(19) United States
(12) Patent Application Publication
(10) Pub. No.: US 2023/0382952 A1
(43) Pub. Date: Nov. 30, 2023

(54) COMPOSITIONS COMPRISING HIV ENVELOPES TO INDUCE HIV-1 ANTIBODIES

(71) Applicants: Bette T. KORBER, Los Alamos, NM (US); Kshitij G. WAGH, Los Alamos, NM (US); Duke University, Durham, NC (US)

(72) Inventors: Kevin O. SAUNDERS, Durham, NC (US); Barton F. HAYNES, Durham, NC (US); Bette T. KORBER, Los Alamos, NM (US); Kshitij G. WAGH, Los Alamos, NM (US)

(21) Appl. No.: 18/032,497

(22) PCT Filed: Oct. 19, 2021
(86) PCT No.: PCT/US2021/055699

§ 371 Date: Apr. 18, 2023

Related U.S. Application Data
(60) Provisional application No. 63/093,675, filed on Oct. 19, 2020.

(51) Int. Cl. C07K 14/005; A61K 39/21

(52) U.S. Cl. CPC C07K 14/005; A61K 39/21; C12N 2740/16122; C12N 2740/16134; A61K 2039/55555

(57) ABSTRACT

The invention is directed to modified HIV-1 envelopes, compositions comprising these modified envelopes, nucleic acids encoding these modified envelopes, compositions comprising these nucleic acids, and methods of using these modified HIV-1 envelopes and/or these nucleic acids to induce immune responses.

[0001] This application claims the benefit of and priority to U.S. Application Ser. No. 63/093,675 filed Oct. 19, 2020 the content of which is hereby incorporated by reference in its entirety.

[0002] This invention was made with government support under Center for HIV/AIDS Vaccine Immunology-Immunogen Design grant UM1-AI144371 from the NIH, NIAID, Division of AIDS. The government has certain rights in the invention. The United States government also has certain rights in this invention pursuant to Contract No. 89233218CNA000001 between the United States Department of Energy and Triad National Security, LLC for the operation of Los Alamos National Laboratory.

### SEQUENCE LISTING

[0003] The instant application contains a Sequence Listing which has been submitted electronically in ASCII format and is hereby incorporated by reference in its entirety. Said ASCII copy, created on Oct. 19, 2021, is named 1234300_00378WO1_SL.txt and is 776,647 bytes in size. The Sequence Listing ASCII copy includes SEQ ID NOs: 1-185 which form part of the description filed in the form of an Annex C/ST.25 text file. SEQ ID NOs: 186-196 also form part of the description and are included herewith in the description and figures.

### TECHNICAL FIELD

[0004] The present invention relates in general, to a composition suitable for use in inducing anti-HIV-1 antibodies, and, in particular, to immunogenic compositions comprising envelope proteins and nucleic acids to induce cross-reactive neutralizing antibodies and increase their breadth of coverage. The invention also relates to methods of inducing such broadly neutralizing anti-HIV-1 antibodies using such compositions.

### BACKGROUND

[0005] The development of a safe and effective HIV-1 vaccine is one of the highest priorities of the scientific community working on the HIV-1 epidemic. While anti-retroviral treatment (ART) has dramatically prolonged the lives of HIV-1 infected patients, ART is not routinely available in developing countries.

### SUMMARY OF THE INVENTION

[0006] In certain embodiments, the invention provides compositions and methods for induction of an immune response, for example cross-reactive (broadly) neutralizing (bn) Ab induction.

[0007] In certain aspects the invention provides a selection of a series of immunogens and immunogen designs for induction of neutralizing HIV-1 antibodies, e.g. but not limited to V3 glycan epitope targeting antibodies, the selection comprising envelopes as follows: 1) CH848.d0949.10.17 DT (also referred to as CH848.d0949.10.17.N133D.N138T), 2) CH848.d0949.10.17 (also referred to as CH848.d0949.10.17WT), 3) CH848.d0808.15.15, 4) CH848.d0358.80.06, 5) CH848.d1432.5.41, 6) CH848.d1621.4.44 and 7) CH848.d1305.10.35. See Example 1 and Tables 3, 4, 5, 6, 7, 8 and 9. In some embodiments the selection comprises additional HIV-1 Envs, P0402.c2.11 and ZM246F.

[0008] In certain embodiments, CH848.d0949.10.17DT envelope comprises additional modifications D230N.H289N.P291S.E169K and is referred to as CH848.d0949.10.17 DTe. In certain embodiments, CH848.d0949.10.17 envelope comprises additional modifications D230N.H289N.P291S.E169K and is referred to as CH848.d0949.10.17WTe. In non-limiting embodiments, the envelope in the selections for immunization are included as trimers, protein and/or mRNA. In non-limiting embodiments, the envelope in the selections for immunization are included as nanoparticles, protein and/or mRNA. The designation scNP refers to a non-limiting embodiment of a protein nanoparticle formed by sortase conjugation reaction. In non-limiting embodiments, nanoparticles comprise fusion proteins, for example ferritin-envelope fusion proteins.

[0009] In certain aspects the invention provides a recombinant protein or nucleic acid encoding a recombinant protein as described in Example 1 and Tables 3-9. In certain aspects the invention provides a selection of HIV-1 envelopes for use as prime and boost immunogens in methods to induce HIV-1 neutralizing antibodies.

[0010] In certain aspects the invention provides compositions comprising a selection of HIV-1 envelopes and/or nucleic acids encoding these envelopes as described herein for example but not limited to designs as described herein. Without limitations, these selected combinations comprise envelopes which provide representation of the sequence (genetic) and antigenic diversity of the HIV-1 envelope variants which lead to the induction of V1V2 glycan and V3 glycan antibody lineages.

[0011] In certain aspects the invention provides a recombinant HIV-1 envelope comprising a 17 amino acid (17aa) V1 region, lacking glycosylation at position N133 and N138 (HXB2 numbering), comprising glycosylation at N301 (HXB2 numbering) and N332 (HXB2 numbering), comprising modifications wherein glycan holes are filled (D230N_H289N_P291S (HXB2 numbering)), comprising the “GDIR” (SEQ ID NO:1) or “GDIK” (SEQ ID NO:2), or any trimer stabilization modifications, UCA targeting modification, immunogenicity modification, or combinations thereof, for example but not limited to those described in Table 2. In certain embodiments the recombinant envelope optionally comprises any combinations of these modifications.

[0012] In certain embodiments, the envelope is not a CH848 10.17 DT variant described previously in PCT Publication No. WO2018161049.

[0013] In certain embodiments the envelope is a protomer which could be comprised in a stable trimer.

[0014] In certain embodiments the envelope comprises additional mutations stabilizing the envelope trimer. In certain embodiments these including but are not limited to SOSIP mutations. In certain embodiments mutations are selected from sets F1-F14, VT1-VT8 mutations described herein, or any combination or subcombination within a set. In certain embodiments, the selected mutations are F14. In other embodiments, the selected mutations are VT8. In certain embodiments, the selected mutations are F14 and VT8 combined.

[0015] In certain embodiments, the invention provides a recombinant HIV-1 envelope of FIG. 1, FIG. 2, FIG. 3, or FIG. 20. In certain embodiments, the invention provides a nucleic acid encoding any of the recombinant envelopes. In certain embodiments, the nucleic acids comprise an mRNA formulated for use as a pharmaceutical composition.

[0016] In certain embodiments the inventive designs comprise specific changes (D230N_H289N_P291S (HXB2 numbering)) which fill glycan holes with the introduction of new glycosylation sites to prevent the binding of strain-specific antibodies that could hinder broad neutralizing antibody development. See Wagh, Kshitij et al. “Completeness of HIV-1 Envelope Glycan Shield at Transmission Determines Neutralization Breadth.” Cell reports vol. 25, 4 (2018): 893-908.e7. doi:10.1016/j.celrep.2018.09.087; Crooks, Ema T et al. “Vaccine-Elicited Tier 2 HIV-1 Neutralizing Antibodies Bind to Quaternary Epitopes Involving Glycan-Deficient Patches Proximal to the CD4 Binding Site.” PLoS pathogens vol. 11, 5 e1004932. 29 May 2015, doi:10.1371/journal.ppat.1004932.

[0017] In certain embodiments, the inventive designs comprise modifications, including without limitation fusion of the HIV-1 envelope with ferritin using linkers between the HIV-1 envelope and ferritin designed to optimize ferritin nanoparticle assembly.

[0018] In certain embodiments, the invention provides HIV-1 envelopes comprising Lys327 (HXB2 numbering) optimized for administration as a prime to initiate V3 glycan antibody lineage, e.g. DH270 antibody lineage.

[0019] In certain embodiments, the invention provides HIV-1 envelopes comprising Lys169 (HXB2 numbering).

[0020] In certain embodiments, the invention provides a composition comprising any one of the inventive envelopes or nucleic acid sequences encoding the same. In certain embodiments, the nucleic acid is mRNA. In certain embodiments, the mRNA is comprised in a lipid nano-particle (LNP).

[0021] In certain embodiments, the invention provides compositions comprising a nanoparticle which comprises any one of the envelopes of the invention.

[0022] In certain embodiments, the invention provides compositions comprising a nanoparticle which comprises any one of the envelopes of the invention, wherein the nanoparticle is a ferritin self-assembling nanoparticle.

[0023] In certain embodiments, the invention provides a method of inducing an immune response in a subject comprising administering an immunogenic composition comprising any one of the stabilized recombinant HIV-1 envelopes of the invention. In certain embodiments, the composition is administered as a prime and/or a boost. In certain embodiments, the composition comprises nanoparticles. In certain embodiments, methods of the invention further comprise administering an adjuvant.

[0024] In certain embodiments, the invention provides a composition comprising a plurality of nanoparticles comprising a plurality of the recombinant HIV-1 envelopes/trimers of the invention. In non-limiting embodiments, the envelopes/trimers of the invention are multimeric when comprised in a nanoparticle. The nanoparticle size is suitable for delivery. In non-liming embodiments the nanoparticles are ferritin based nanoparticles.

[0025] In certain aspects, the invention provides nucleic acids comprising sequences encoding proteins of the invention. In certain embodiments, the nucleic acids are DNAs. In certain embodiments, the nucleic acids are mRNAs. In certain aspects, the invention provides expression vectors comprising the nucleic acids of the invention.

[0026] In certain aspects, the invention provides a pharmaceutical composition comprising mRNAs encoding proteins of the invention. In certain embodiments, these are optionally formulated in lipid nanoparticles (LNPs). In certain embodiments, the mRNAs are modified. Modifications include without limitations modified ribonucleotides, poly-A tail, 5′cap.

[0027] In certain aspects the invention provides nucleic acids encoding the inventive protein designs. In non-limiting embodiments, the nucleic acids are mRNA, modified or unmodified, suitable for use any use, e.g but not limited to use as pharmaceutical compositions. In certain embodiments, the nucleic acids are formulated in lipid, such as but not limited to LNPs. Non-limiting embodiments include LNPs without polyethylene glycol.

[0028] In certain aspects the invention provides a recombinant HIV-1 envelope selected from the envelopes listed in Table 3 or Table 4, FIGS. 1-3, or FIG. 20. In certain aspects the invention provides a selection of envelopes from Table 3-9, FIGS. 1-3, or FIG. 20, or Example 1 for use as immunogens in methods to induce antibody responses to HIV-1 envelope.

[0029] In certain embodiments, the envelope is a protomer comprised in a trimer. In some embodiments, the envelope is comprised in a stable trimer. In certain embodiments, the nanoparticle comprises any one of the envelopes Table 3-9, FIGS. 1-3, FIG. 20, or Example 1, for example without limitation for use as immunogens. In certain embodiments, the nanoparticle is ferritin self-assembling nanoparticle.

[0030] In certain aspects, the invention provides a composition comprising a nanoparticle and a carrier, wherein the nanoparticle comprises any one of the trimers of envelopes Table 3-9, FIGS. 1-3, FIG. 20, or Example 1. In certain embodiments, the nanoparticle is a ferritin self-assembling nanoparticle. In certain embodiments, the nanoparticle comprises multimers of trimers. Provided also are method for using these compositions comprising nanoparticles.

[0031] In certain aspects, the invention provides a method of inducing an immune response in a subject comprising administering an immunogenic composition comprising any one of the recombinant envelopes of Table 3-9, FIGS. 1-3, FIG. 20, or Example 1, or compositions comprising these envelopes and/or nanoparticles, in an amount sufficient to induce an immune response. In certain embodiments, the composition is administered as a prime.

[0032] In certain embodiments, the composition is administered as a boost.

[0033] In certain aspects, the invention provides a nucleic acid encoding any of the recombinant envelopes and methods for their use to induce immune response in a subject in need thereof.

[0034] In certain aspects the invention provides a method of inducing an immune response comprising administering an immunogenic composition comprising a prime immunogen from Table 4 followed by at least one boost immunogen from Table 4, wherein in some embodiments the boost immunogens are administered in the order appearing in Table 4, or Table 5-9 in an amount sufficient to induce an immune response. In certain embodiments, the prime is one of the CH848.0949.10.17DT or CH848.0949.10.17DTe designs, for example in Table 3 or Table 4. In certain embodiments, the first boost is one of the CH848.0949.10.17WT or CH848.0949.10.17WTe designs, for example in Table 3 or Table 4.

[0035] In certain embodiments, the methods further comprise administering a boost from Table 4, or Table 5-9, wherein the boost is CH848.0808.15.15 in any suitable form.

[0036] In certain embodiments, the methods further comprise administering a boost from Table 4, wherein the boost is CH848.0358.80.06 in any suitable form.

[0037] In certain embodiments, the methods further comprise administering a boost from Table 4, wherein the boost is CH848.1432.5.41 in any suitable form.

[0038] In certain embodiments, the methods further comprise administering a boost from Table 4, wherein the boost is CH848.1621.4.44 in any suitable form.

[0039] In certain embodiments, the methods further comprise administering a boost from Table 4, wherein the boost is CH848.1305.10.35 in any suitable form.

[0040] In certain embodiments, the methods further comprise comprising administering a boost from Table 4, wherein the boost is P0402.c2.11 (G) in any suitable form.

[0041] In certain embodiments, the methods further comprise administering a boost from Table 4, wherein the boost is ZM246F (C) in any suitable form.

[0042] In certain embodiments, the prime and/or boost immunogen are administered as a nanoparticle. In certain embodiments, the nanoparticle is a ferritin nanoparticle. In certain embodiments, the methods further comprise administering the prime and/or boost immunogen as a mRNA-LNP formulation.

[0043] In certain embodiments, the methods further comprise administering any suitable adjuvant.

### BRIEF DESCRIPTION OF THE DRAWINGS

[0044] The patent or application file contains at least one drawing executed in color. To conform to the requirements for PCT patent applications, many of the figures presented herein are black and white representations of images originally created in color.

[0045] FIGS. 1A-1H show non-limiting examples of envelopes designs and sequences described in Table 3. FIGS. 1A-1D show non-limiting embodiments of nucleic acid sequence. Nucleotide sequences have the signal peptide sequences. FIGS. 1E-1H show amino acid sequences. Amino acid sequences lack the signal peptide sequences. FIG. 1I shows correlation of envelope names with HV numbers and SEQ ID Nos.

[0046] FIGS. 2A part (i)-2B part (xxxi) shows non-limiting examples of envelope designs and sequences described in Table 4—envelopes CH848.0808.15.15, CH848.1621.4.44, CH848.1305.10.35, P0402.c2.11 (G), ZM246F (C). This figure shows selected sequences from Table 4. FIG. 2A parts (i)-(xxxi) show non-limiting embodiments of nucleic acid sequence and FIG. 2B parts (i)-(xxxi) show amino acid sequences. In the amino acid sequences the signal sequence is underlined. FIG. 2C shows correlation of envelope names with HV numbers and SEQ ID Nos.

[0047] FIGS. 3A-3T show non-limiting examples of designs and sequences based on envelopes CH848.0358.80.06 and CH848.1432.5.41. FIGS. 3A-3J show non-limiting embodiments of nucleic acid sequence and FIGS. 3K-T show amino acid sequences. In the amino acid sequences the signal sequence is underlined. FIG. 3U shows correlation of envelope names with HV numbers and SEQ ID Nos.

[0048] FIGS. 4A-B show signature sites. Signatures are amino acids/glycans that are statistically enriched in one group of viruses vs other. FIG. 4A shows systematic definition of bnAb education sites. To systematically probe overlapping signature sites consider the following: Overlapping signature sites; Borderline: Signature defined in one dataset, if also a borderline signature in the other; Phylogenetic or not; p<0.05; Same association with the same feature. For IA2 breadth gain, only one borderline signature found in autologous dataset (NxST230)-retained this. These analyses gave six sites—these are amino acid positions HXB2 numbering: 230, 241, 300, 301, 325, 328, where 241, 300 & 325 are phylogenetic. FIG. 4B shows bNAb Education Signature Sites.

[0049] FIG. 5 shows logo plots of bnAb education sites. IA4-sensitive: CH848.d0949.10.17 matches all sensitive variants. IA2 breadth gain: 230 NxST associated with IA2 breadth gain (only autologous). E-325 is quite rare in heterologous viruses. IA1 breadth gain: Breadth gain variants: K-241, G/Y-300 & K-328. N-325 recognized at very low frequency. DH270.6/.4 gain: Y-300 & K-328 are better recognized. N-325 is still rarely recognized. Resistance to all DH270 lineage: Main routes of escape loss of NxST301 & N325 (heterologous only NxST-332 viruses considered). Panel on the left is Global Panel and panel on the right is Autologous Panel—on the X-axis are positions of bnAb education sites 230, 241, 300, 301k 325, and 328. See Example 1. Amino acid colors as follows: Blue (represented by darkest gray in grayscale image) shows initial lineage sensitivity; green (represented by medium gray in grayscale image) shows breadth gain; red (represented by medium gray plus asterisk in grayscale image) shows resistance signature; lightest grey and black show non-significant amino acids. In this figure adjacent amino acids do not represent a continuous peptide, but rather amino acids at the signature sites positions: 230, 241, 300, 301, 325 and 328.

[0050] FIG. 6 shows an embodiment of an immunogen design comprising prime and boost. In this figure adjacent amino acids do not represent a continuous peptide, but rather amino acids at the signature sites positions: 230, 241, 300, 301, 325 and 328.

[0051] FIG. 7 shows one embodiment of a selection of immunogens. Non-limiting embodiments of these envelopes are listed in Tables 3 and 4. In this figure adjacent amino acids do not represent a continuous peptide, but rather amino acids at the signature sites positions: 230, 241, 300, 301, 325 and 328.

[0052] FIG. 8 shows a selection of immunogens for breadth gain beyond DH270.6. Some N-325 viruses are sensitive to DH270.6. Chose this for a gentler heterologous boost. The most sensitive virus P0402.c2.11 (subtype G, tier 2) was the only virus that also provided coverage at other sites (27 & 85). No virus lacking NxST 301 was neutralized by DH270.6. From CATNAP we found ZM246F that is sensitive all other V3g bNAbs, but not tested on DH270.6. In this figure adjacent amino acids do not represent a continuous peptide, but rather amino acids at the signature sites positions: 230, 241, 300, 301, 325 and 328.

[0053] FIGS. 9A-B show vaccine elicitation of serum neutralization in mouse studies Mu563-1 and Mu563-2. FIG. 9A shows DH270 UCA3 VH^{+/-}, VL^{+/-} mouse immunization regimen—mice were immunized 4× with prime and 4× with boost 1. FIG. 9B shows serum neutralization titer as serum dilution required to inhibit 50% of virus replication one week after the final immunization. Horizontal line represents group geometric mean. Each symbol represents an individual mouse.

[0054] FIGS. 10A-B show vaccine elicitation of serum neutralization in mouse studies Mu565-1 and Mu565-2. FIG. 10A shows DH270 UCA3 VH^{+/-}, VL^{+/-} mouse immunization regimen—mice were immunized 4× with prime and 2× with boost 1 and 2× with boost 2. FIG. 10B shows serum neutralization titer as serum dilution required to inhibit 50% of virus replication one week after the final immunization. Horizontal line represents group geometric mean. Each symbol represents an individual mouse. The Mu563 and Mu565 studies compared the boosting effects of HV1301335 and HV1302164 preceded by the HV1302145 envelope or administered directly after HV1301925 prime. The regimen including HV1301335 was superior to the regimen with HV1302164 in eliciting heterologous neutralizing. The heterologous neutralization of 92RW020 was enhanced by including the HV1302145 envelope as the second boost (compare Mu563-1 vs Mu565-1).

[0055] FIGS. 11A-11C show vaccine elicitation of serum neutralization in mouse studies Mu486-2 and Mu486-1. FIG. 11A shows DH270 UCA3 VH^{+/-}, VL^{+/-} mouse immunization regimen. FIGS. 11B-C show serum neutralization titer against autologous (FIG. 11B) and heterologous (FIG. 11C) viruses shown as serum dilution required to inhibit 50% of virus replication one week after the final immunization. N133D N138T matches the priming immunogen for both groups. N332T is a knockout mutation for the antibody of interest DH270. SVA is a negative control unrelated virus. Horizontal line represents group geometric mean. Each symbol represents an individual mouse. This study compared different boosting immunogens. Boosting with CH848.D949.10.17 (Mu486-2) elicited superior serum neutralization titers compared to boosting with a sequence of 5 different envelopes (Mu486-1). This study also investigated vaccine induction of critical mutations for antibody function. Amino acid sequence comparison between vaccine-induced antibodies and DH270 natural lineage antibodies. These antibodies were induced by vaccination and show that vaccination is inducing somatic mutation of DH270 antibodies. Mutations in the VH that are critical to select for are G57R and R98T. Both of these somatic mutations are selected by the vaccine regimen in group 2. In the VL of DH270, S27Y and L48Y are critical for neutralization activity. Both S27Y and L48Y were selected for in the vaccine-elicited antibodies. Prime-boost vaccination is eliciting antibodies with the critical somatic mutations needed for broad neutralization.

[0056] FIGS. 12A-12B show vaccine elicitation of serum neutralization in mouse study Mu534-1. FIG. 12A shows DH270 UCA3 VH^{+/-}, VL^{+/-} mouse immunization regimen. FIG. 12B shows serum neutralization titer against autologous and heterologous viruses shown as serum dilution required to inhibit 50% of virus replication one week after the final immunization. N133D N138T matches the priming immunogen for both groups. N332T is a knockout mutation for the antibody of interest DH270. SVA is a negative control unrelated virus. Horizontal line represents group geometric mean. Each symbol represents an individual mouse. This study is a repeat of Mu486-2. This study showed that CH848.10.17 DT scNP followed by 10.17 trimer induction of heterologous neutralizing antibodies was reproducible. Induction of 92RW020 neutralization is a virus that is sensitive to affinity matured DH270 antibodies but not the UCA. Serum antibodies from the vaccinate mice neutralize 92RW020 indicating the DH270 antibodies have evolved.

[0057] FIG. 13 shows neutralization breadth elicited by prime-boost vaccine regimen. DH270 UCA3 VH^{+/-}, VL^{+/-} mouse immunization regimen as in FIG. 11—mouse studies Mu486-2 and Mu486-1. FIG. 13B. MAb neutralization titer IC50 as mcg per mL required to inhibit 50% of virus replication. Ab730526 was isolated from group 1. The remaining antibodies were isolated from group 2. NT, not tested. These antibodies were induced by vaccination. These vaccine-induced antibodies shown here exhibit broad neutralization. Their neutralization is superior to Dh270.I5.6 which is the first inferred node of the DH270.6 phylogeny. Each antibody has a second version with an additional mutation added (_X), which shows that the artificial addition of DH270 somatic mutations to the antibody further improves neutralization breadth. These artificially-mutated antibodies indicate the mutations that are needed to be selected by the next set of vaccine immunogens.

[0058] FIGS. 14A-D show next generation sequencing of heavy chain variable regions shows vaccine selection of critical functional improbable mutations needed for DH270 antibody affinity maturation. FIG. 14A shows each DH270 UCA3 VH^{+/-}, VL^{+/-} mouse immunization regimen. FIGS. 14B-D show the frequency of the observed somatic mutation. Adjuvant only groups are shown as Adj only GLA-SE for protein immunization and Adj only LNP for mRNA. Group median is shown by horizontal bars. Mu546 and Mu547 studies delivered the envelopes as mRNAs. All other groups used proteins.

[0059] FIGS. 15A-C show next generation sequencing of light chain variable regions shows vaccine selection of critical functional improbable mutations needed for DH270 antibody affinity maturation. FIG. 15A shows each DH270 UCA3 VH^{+/-}, VL^{+/-} mouse immunization regimen. FIGS. 15B-C show the frequency of the observed somatic mutation. Adjuvant only groups are shown as Adj only GLA-SE for protein immunization and Adj only LNP for mRNA. Group median is shown by horizontal bars. Mu546 and Mu547 studies delivered the envelopes as mRNAs. All other groups used proteins. Mouse studies 563 and 565 included the D358.80.06 DS.ch.SOSIP and D526.25.05 DS.ch.SOSIP as boosting immunogens. Based on the frequency of somatic mutations observed in DH270 sequences, D358.80.06 DS.ch.SOSIP and D526.25.05 DS.ch.SOSIP did not select for higher frequencies of VH (G57R, R98T) mutations or VL (L48Y, S27Y) mutations than immunizing with CH848.D949.10.17N133D/N138T alone (Mu408 or Mu445 group 5). mRNA immunization selected for higher frequencies of VL (L48Y, S27Y) mutations than protein immunization with the same envelope.

[0060] FIG. 16 shows DH270 phylogenetic tree.

[0061] FIG. 17 shows reactivity of the sequential Env signature-based vaccine envelopes with DH270 lineage members. Biolayer interferometry binding magnitude determined for DH270 antibodies through the affinity maturation process. Binding has been normalized to loading response. Envelopes were selected based on neutralization sensitivity to different members of the DH270 lineage. Recombinant envelopes were generated based on the viruses selected by neutralization signature analysis. The envelope reactivity with antibodies at different stages of maturation in the DH270 lineage was assessed and the envelopes show a staged pattern of reactivity. The staged reactivity showed that certain DH270 antibodies acquired reactivity with selected envelopes at specific points of affinity maturation. For example, P0402 envelope did not bind to lowly mutated antibodies (Dh270 UCA, I5.6, or I3.6), but the antibody lineage acquired binding once it mutated to the DH270.1 stage of maturation. This differential binding is expected to facilitate selection of antibodies during the affinity maturation process. Administering these envelopes in sequence could select for affinity maturation of DH270-like antibodies into a bnAb.

[0062] FIG. 18 shows one embodiment of a design for the production of trimeric HIV-1 Env on ferritin nanoparticles. In some embodiments the Sortase A tag is LPSTGG (SEQ ID NO: 25) which is modified from LPSTG (SEQ ID NO: 26) because an additional Gly residue helps accelerate the reaction rate.

[0063] FIGS. 19A-19G show correlation of envelopes with SEQ ID Nos.

[0064] FIGS. 20A-K shows non-limiting embodiments of HIV-1 envelopes used in animal studies in Example 2. FIG. 20A-20E shows non-limiting embodiments of nucleic acids. FIG. 20F-20J shows non-limiting embodiments of amino acids sequences with a signal peptide. FIG. 20K shows correlation of envelope names with HV numbers and SEQ ID NOs.

### DETAILED DESCRIPTION OF THE INVENTION

[0065] The development of a safe, highly efficacious prophylactic HIV-1 vaccine is of paramount importance for the control and prevention of HIV-1 infection. A major goal of HIV-1 vaccine development is the induction of broadly neutralizing antibodies (bnAbs) (Immunol. Rev. 254: 225-244, 2013). BnAbs are protective in rhesus macaques against SHIV challenge, but as yet, are not induced by current vaccines.

[0066] The invention provides methods of using these pan bnAb envelope immunogens.

[0067] In certain aspect, the invention provides compositions for immunizations to induce lineages of broad neutralizing antibodies. In certain embodiments, there is some variance in the immunization regimen; in some embodiments, the selection of HIV-1 envelopes may be grouped in various combinations of primes and boosts, either as nucleic acids, proteins, or combinations thereof. In certain embodiments the compositions are pharmaceutical compositions which are immunogenic. In certain embodiments, the compositions comprise amounts of envelopes which are therapeutic and/or immunogenic.

[0068] In one aspect the invention provides a composition for a prime boost immunization regimen comprising any one of the envelopes described herein, or any combination thereof wherein the envelope is a prime or boost immunogen. In certain embodiments the composition for a prime boost immunization regimen comprises one or more envelopes described herein.

[0069] In certain embodiments, the compositions contemplate nucleic acid, as DNA and/or RNA, or recombinant protein immunogens either alone or in any combination. In certain embodiments, the methods contemplate genetic, as DNA and/or RNA, immunization either alone or in combination with recombinant envelope protein(s).

[0070] In some embodiments the antigens are nucleic acids, including but not limited to mRNAs which could be modified and/or unmodified. See US Pub 20180028645A1, US Pub 20170369532, US Pub 20090286852, US Pub 20130111615, US Pub 20130197068, US Pub 20130261172, US Pub 20150038558, US Pub 20160032316, US Pub 20170043037, US Pub 20170327842, the content of each of which is incorporated by reference in its entirety. mRNAs delivered in LNP formulations have advantages over non-LNPs formulations. See US Pub 20180028645A1.

[0071] In certain embodiments the nucleic acid encoding an envelope is operably linked to a promoter inserted an expression vector. In certain aspects the compositions comprise a suitable carrier. In certain aspects the compositions comprise a suitable adjuvant.

[0072] In certain embodiments the induced immune response includes induction of antibodies, including but not limited to autologous and/or cross-reactive (broadly) neutralizing antibodies against HIV-1 envelope. Various assays that analyze whether an immunogenic composition induces an immune response, and the type of antibodies induced are known in the art and are also described herein.

[0073] In certain aspects the invention provides an expression vector comprising any of the nucleic acid sequences of the invention, wherein the nucleic acid is operably linked to a promoter. In certain aspects the invention provides an expression vector comprising a nucleic acid sequence encoding any of the polypeptides of the invention, wherein the nucleic acid is operably linked to a promoter. In certain embodiments, the nucleic acids are codon optimized for expression in a mammalian cell, in vivo or in vitro. In certain aspects the invention provides nucleic acids comprising any one of the nucleic acid sequences of invention. In certain aspects the invention provides nucleic acids consisting essentially of any one of the nucleic acid sequences of invention. In certain aspects the invention provides nucleic acids consisting of any one of the nucleic acid sequences of invention. In certain embodiments the nucleic acid of the invention, is operably linked to a promoter and is inserted in an expression vector. In certain aspects the invention provides an immunogenic composition comprising the expression vector.

[0074] In certain aspects the invention provides a composition comprising at least one of the nucleic acid sequences of the invention. In certain aspects the invention provides a composition comprising any one of the nucleic acid sequences of invention. In certain aspects the invention provides a composition comprising at least one nucleic acid sequence encoding any one of the polypeptides of the invention.

[0075] The envelope used in the compositions and methods of the invention can be a gp160, gp150, gp145, gp140, gp120, gp41, N-terminal deletion variants as described herein, cleavage resistant variants as described herein, or codon optimized sequences thereof. In certain embodiments the composition comprises envelopes as trimers. In certain embodiments, envelope proteins are multimerized, for example trimers are attached to a particle such that multiple copies of the trimer are attached and the multimerized envelope is prepared and formulated for immunization in a human. In certain embodiments, the compositions comprise envelopes, including but not limited to trimers as a particulate, high-density array on liposomes or other particles, for example but not limited to nanoparticles. In some embodiments, the trimers are in a well ordered, near native like or closed conformation. In some embodiments the trimer compositions comprise a homogenous mix of native like trimers. In some embodiments the trimer compositions comprise at least 85%, 90%, 95% native like trimers.

[0076] In certain embodiments the envelope is any of the forms of HIV-1 envelope. In certain embodiments the envelope is gp120, gp140, gp145 (i.e. with a transmembrane domain), or gp150. In certain embodiments, gp140 is designed to form a stable trimer. See Tables 3-9, FIGS. 1-3 and 20 for non-limiting examples of sequence designs. In certain embodiments envelope protomers form a trimer which is not a SOSIP timer. In certain embodiment the trimer is a SOSIP based trimer wherein each protomer comprises additional modifications. In certain embodiments, envelope trimers are recombinantly produced. In certain embodiments, envelope trimers are purified from cellular recombinant fractions by antibody binding and reconstituted in lipid comprising formulations. See for example WO2015/127108 titled “Trimeric HIV-1 envelopes and uses thereof” and WO2017/151801 the content of each of which is herein incorporated by reference in its entirety. In certain embodiments the envelopes of the invention are engineered and comprise non-naturally occurring modifications.

[0077] In certain embodiments, the envelope is in a liposome. In certain embodiments the envelope comprises a transmembrane domain with a cytoplasmic tail, wherein the transmembrane domain is embedded in a liposome. In certain embodiments, the nucleic acid comprises a nucleic acid sequence which encodes a gp120, gp140, gp145, gp150, or gp160.

[0078] In certain embodiments, where the nucleic acids are operably linked to a promoter and inserted in a vector, the vector is any suitable vector. Non-limiting examples include, VSV, replicating rAdenovirus type 4, MVA, Chimp adenovirus vectors, pox vectors, and the like. In certain embodiments, the nucleic acids are administered in NanoTaxi block polymer nanospheres. In certain embodiments, the composition and methods comprise an adjuvant. Non-limiting examples include, 3M052, AS01 B, AS01 E, gla/SE, alum, Poly I poly C (poly IC), polyIC/long chain (LC) TLR agonists, TLR7/8 and 9 agonists, or a combination of TLR7/8 and TLR9 agonists (see Moody et al. (2014) J. Virol. March 2014 vol. 88 no. 6 3329-3339), or any other adjuvant. Non-limiting examples of TLR7/8 agonist include TLR7/8 ligands, Gardiquimod, Imiquimod and R848 (resiquimod). A non-limiting embodiment of a combination of TLR7/8 and TLR9 agonist comprises R848 and oCpG in STS (see Moody et al. (2014) J. Virol. March 2014 vol. 88 no. 6 3329-3339).

[0079] In non-limiting embodiments, the adjuvant is an LNP. See e.g., without limitation Shirai et al. “Lipid Nanoparticle Acts as a Potential Adjuvant for Influenza Split Vaccine without Inducing Inflammatory Responses” Vaccines 2020, 8, 433; doi:10.3390/vaccines8030433, published 3 Aug. 2020.

[0080] In non-limiting embodiments, LNPs used as adjuvants for protein or mRNA compositions are composed of an ionizable lipid, cholesterol, lipid conjugated with polyethylene glycol, and a helper lipid. Non-limiting embodiments include LNPs without polyethylene glycol.

[0081] In certain aspects the invention provides a cell comprising a nucleic acid encoding any one of the envelopes of the invention suitable for recombinant expression. In certain aspects, the invention provides a clonally derived population of cells encoding any one of the envelopes of the invention suitable for recombinant expression. In certain aspects, the invention provides a stable pool of cells encoding any one of the envelopes of the invention suitable for recombinant expression.

[0082] In certain aspects, the invention provides a recombinant HIV-1 envelope polypeptide as described here, wherein the polypeptide is a non-naturally occurring protomer designed to form an envelope trimer. The invention also provides nucleic acids encoding these recombinant polypeptides. Non-limiting examples of amino acids and nucleic acid of such protomers are disclosed herein.

[0083] In certain aspects the invention provides a recombinant trimer comprising three identical protomers of an envelope. In certain aspects the invention provides an immunogenic composition comprising the recombinant trimer and a carrier, wherein the trimer comprises three identical protomers of an HIV-1 envelope as described herein. In certain aspects the invention provides an immunogenic composition comprising nucleic acid encoding these recombinant HIV-1 envelope and a carrier.

[0084] Described herein are nucleic and amino acids sequences of HIV-1 envelopes. The sequences for use as immunogens are in any suitable form. In certain embodiments, the described HIV-1 envelope sequences are gp160s. In certain embodiments, the described HIV-1 envelope sequences are gp120s. Other sequences, for example but not limited to stable SOSIP trimer designs, gp145s, gp140s, both cleaved and uncleaved, gp140 Envs with the deletion of the cleavage (C) site, fusion (F) and immunodominant (I) region in gp41—named as gp140ΔCFI (gp140CFI), gp140 Envs with the deletion of only the cleavage (C) site and fusion (F) domain—named as gp140ΔCF (gp140CF), gp140 Envs with the deletion of only the cleavage (C)—named gp140ΔC (gp140C) (See e.g. Liao et al. Virology 2006, 353, 268-282), gp150s, gp41s, which can be readily derived from the nucleic acid and amino acid gp160 sequences. In certain embodiments the nucleic acid sequences are codon optimized for optimal expression in a host cell, for example a mammalian cell, a rBCG cell or any other suitable expression system.

[0085] An HIV-1 envelope has various structurally defined fragments/forms: gp160; gp140—including cleaved gp140 and uncleaved gp140 (gp140C), gp140CF, or gp140CFI; gp120 and gp41. A skilled artisan appreciates that these fragments/forms are defined not necessarily by their crystal structure, but by their design and bounds within the full length of the gp160 envelope. While the specific consecutive amino acid sequences of envelopes from different strains are different, the bounds and design of these forms are well known and characterized in the art.

[0086] For example, it is well known in the art that during its transport to the cell surface, the gp160 polypeptide is processed and proteolytically cleaved to gp120 and gp41 proteins. Cleavages of gp160 to gp120 and gp41 occurs at a conserved cleavage site “REKR” (SEQ ID NO:4). See Chakrabarti et al. Journal of Virology vol. 76, pp. 5357-5368 (2002) see for example FIG. 1, and second paragraph in the Introduction on p. 5357; Binley et al. Journal of Virology vol. 76, pp. 2606-2616 (2002) for example at Abstract; Gao et al. Journal of Virology vol. 79, pp. 1154-1163 (2005); Liao et al. Virology vol. 353(2): 268-282 (2006).

[0087] The role of the furin cleavage site was well understood both in terms of improving cleavage efficiency, see Binley et al. supra, and eliminating cleavage, see Bosch and Pawlita, Virology 64 (5):2337-2344 (1990); Guo et al. Virology 174: 217-224 (1990); McCune et al. Cell 53:55-67 (1988); Liao et al. J Virol. April; 87(8):4185-201 (2013).

[0088] Likewise, the design of gp140 envelope forms is also well known in the art, along with the various specific changes which give rise to the gp140C (uncleaved envelope), gp140CF and gp140CFI forms. Envelope gp140 forms are designed by introducing a stop codon within the gp41 sequence. See Chakrabarti et al. at FIG. 1.

[0089] Envelope gp140C refers to a gp140 HIV-1 envelope design with a functional deletion of the cleavage (C) site, so that the gp140 envelope is not cleaved at the furin cleavage site. The specification describes cleaved and uncleaved forms, and various furin cleavage site modifications that prevent envelope cleavage are known in the art. In some embodiments of the gp140C form, two of the R residues in and near the furin cleavage site are changed to E, e.g., RRVVEREKR (SEQ ID NO:5) is changed to ERVVEREKE (SEQ ID NO:6), and is one example of an uncleaved gp140 form. Another example is the gp140C form which has the REKR site (SEQ ID NO:4) changed to SEKS (SEQ ID NO:7). See supra for references.

[0090] Envelope gp140CF refers to a gp140 HIV-1 envelope design with a deletion of the cleavage (C) site and fusion (F) region. Envelope gp140CFI refers to a gp140 HIV-1 envelope design with a deletion of the cleavage (C) site, fusion (F) and immunodominant (I) region in gp41. See Chakrabarti et al. Journal of Virology vol. 76, pp. 5357-5368 (2002) at for example FIG. 1, and Second paragraph in the Introduction on p. 5357; Binley et al. Journal of Virology vol. 76, pp. 2606-2616 (2002) for example at Abstract; Gao et al. Journal of Virology vol. 79, pp. 1154-1163 (2005); Liao et al. Virology vol. 353(2): 268-282 (2006).

[0091] In certain embodiments, the envelope design in accordance with the present invention involves deletion of residues (e.g., 5-11, 5, 6, 7, 8, 9, 10, or 11 amino acids) at the N-terminus. For delta N-terminal design, amino acid residues ranging from 4 residues or even fewer to 14 residues or even more are deleted. These residues are between the maturation (signal peptide, usually ending with CXX, wherein X can be any amino acid) and “VPVXXXX . . . ”. In case of CH505 T/F Env as an example, 8 amino acids (italicized and underlined in the below sequence) were deleted: MRVMGIQRNYPQWWIWSMLGFWMLMICNGMWVTVYYGVPVWKEAKTTLFCASDA KAYEKEVHNVWATHACVPTDPNPQE . . . (SEQ ID NO:8) (rest of envelope sequence is indicated as “ . . . ”). In other embodiments, the delta N-design described for CH505 T/F envelope can be used to make delta N-designs of other envelopes. In certain embodiments, the invention relates generally to an HIV-1 envelope immunogen, gp160, gp120, or gp140, without an N-terminal Herpes Simplex gD tag substituted for amino acids of the N-terminus of gp120, with an HIV leader sequence (or other leader sequence), and without the original about 4 to about 25, for example 4, 5, 6, 7, 8, 9, 10, 11, 12, 13, 14, 15, 16, 17, 18, 19, 20, 21, 22, 23, 24, 25 amino acids of the N-terminus of the envelope (e.g. gp120). See WO2013/006688, e.g. at pages 10-12, the contents of which publication is hereby incorporated by reference in its entirety.

[0092] The general strategy of deletion of N-terminal amino acids of envelopes results in proteins, for example gp120s, expressed in mammalian cells that are primarily monomeric, as opposed to dimeric, and, therefore, solves the production and scalability problem of commercial gp120 Env vaccine production. In other embodiments, the amino acid deletions at the N-terminus results in increased immunogenicity of the envelopes.

[0093] In certain aspects, the invention provides composition and methods which use a selection of Envs, as gp120s, gp140s cleaved and uncleaved, gp145s, gp150s and gp160s, stabilized and/or multimerized trimers, as proteins, DNAs, RNAs, or any combination thereof, administered as primes and boosts to elicit immune response. Envs as proteins could be co-administered with nucleic acid vectors containing Envs to amplify antibody induction. In certain embodiments, the compositions and methods include any immunogenic HIV-1 sequences to give the best coverage for T cell help and cytotoxic T cell induction. In certain embodiments, the compositions and methods include mosaic and/or consensus HIV-1 genes to give the best coverage for T cell help and cytotoxic T cell induction. In certain embodiments, the compositions and methods include mosaic group M and/or consensus genes to give the best coverage for T cell help and cytotoxic T cell induction. In some embodiments, the mosaic genes are any suitable gene from the HIV-1 genome. In some embodiments, the mosaic genes are Env genes, Gag genes, Pol genes, Nef genes, or any combination thereof. See e.g. U.S. Pat. No. 7,951,377. In some embodiments the mosaic genes are bivalent mosaics. In some embodiments the mosaic genes are trivalent. In some embodiments, the mosaic genes are administered in a suitable vector with each immunization with Env gene inserts in a suitable vector and/or as a protein. In some embodiments, the mosaic genes, for example as bivalent mosaic Gag group M consensus genes, are administered in a suitable vector, for example but not limited to HSV2, would be administered with each immunization with Env gene inserts in a suitable vector, for example but not limited to HSV-2.

[0094] In certain aspects the invention provides compositions and methods of Env genetic immunization either alone or with Env proteins to recreate the swarms of evolved viruses that have led to bnAb induction. Nucleotide-based vaccines offer a flexible vector format to immunize against virtually any protein antigen. Currently, two types of genetic vaccination are available for testing—DNAs and mRNAs.

[0095] In certain aspects the invention contemplates using immunogenic compositions wherein immunogens are delivered as DNA. See Graham B S, Enama M E, Nason M C, Gordon I J, Peel S A, et al. (2013) DNA Vaccine Delivered by a Needle-Free Injection Device Improves Potency of Priming for Antibody and CD8+ T-Cell Responses after rAd5 Boost in a Randomized Clinical Trial. PLoS ONE 8(4): e59340, page 9. Various technologies for delivery of nucleic acids, as DNA and/or RNA, so as to elicit immune response, both T-cell and humoral responses, are known in the art and are under developments. In certain embodiments, DNA can be delivered as naked DNA. In certain embodiments, DNA is formulated for delivery by a gene gun. In certain embodiments, DNA is administered by electroporation, or by a needle-free injection technology, for example but not limited to Biojector® device. In certain embodiments, the DNA is inserted in vectors. The DNA is delivered using a suitable vector for expression in mammalian cells. In certain embodiments the nucleic acids encoding the envelopes are optimized for expression. In certain embodiments DNA is optimized, e.g. codon optimized, for expression. In certain embodiments the nucleic acids are optimized for expression in vectors and/or in mammalian cells. In non-limiting embodiments these are bacterially derived vectors, adenovirus based vectors, rAdenovirus (e.g. Barouch D H, et al. Nature Med. 16: 319-23, 2010), recombinant mycobacteria (e.g. rBCG or M. smegmatis) (Yu, J S et al. Clinical Vaccine Immunol. 14: 886-093, 2007; ibid 13: 1204-11, 2006), and recombinant vaccinia type of vectors (Santra S. Nature Med. 16: 324-8, 2010), for example but not limited to ALVAC, replicating (Kibler K V et al., PLoS One 6: e25674, 2011 nov 9.) and non-replicating (Perreau M et al. J. virology 85: 9854-62, 2011) NYVAC, modified vaccinia Ankara (MVA)), adeno-associated virus, Venezuelan equine encephalitis (VEE) replicons, Herpes Simplex Virus vectors, and other suitable vectors.

[0096] In certain aspects the invention contemplates using immunogenic compositions wherein immunogens are delivered as DNA or RNA in suitable formulations. Various technologies which contemplate using DNA or RNA, or may use complexes of nucleic acid molecules and other entities to be used in immunization. In certain embodiments, DNA or RNA is administered as nanoparticles consisting of low dose antigen-encoding DNA formulated with a block copolymer (amphiphilic block copolymer 704). See Cany et al., Journal of Hepatology 2011 vol. 54 j 115-121; Arnaoty et al., Chapter 17 in Yves Bigot (ed.), Mobile Genetic Elements: Protocols and Genomic Applications, Methods in Molecular Biology, vol. 859, pp 293-305 (2012); Arnaoty et al. (2013) Mol Genet Genomics. 2013 August; 288(7-8):347-63. Nanocarrier technologies called Nanotaxi® for immunogenic macromolecules (DNA, RNA, Protein) delivery are under development. See for example technologies developed by incellart.

[0097] In certain aspects, the invention provides nucleic acids comprising sequences encoding envelopes of the invention. In certain embodiments, the nucleic acids are DNAs. In certain embodiments, the nucleic acids are mRNAs. In certain aspects, the invention provides expression vectors comprising the nucleic acids of the invention.

[0098] In certain aspects, the invention provides a pharmaceutical composition comprising mRNAs encoding the inventive immunogens. In certain embodiments, these are optionally formulated in lipid nanoparticles (LNPs). In certain embodiments, the mRNAs are modified. Modifications include without limitations modified ribonucleotides, poly-A tail, 5′ cap.

[0099] In certain aspects the invention provides nucleic acids encoding the inventive envelopes. In non-limiting embodiments, the nucleic acids are mRNA, modified or unmodified, suitable for use any use, e.g. but not limited to use as pharmaceutical compositions. In certain embodiments, the nucleic acids are formulated in lipid, such as but not limited to LNPs.

[0100] In some embodiments the immunogens are administered as nucleic acids, including but not limited to mRNAs which could be modified and/or unmodified. See US Pub 20180028645A1, US Pub 20090286852, US Pub 20130111615, US Pub 20130197068, US Pub 20130261172, US Pub 20150038558, US Pub 20160032316, US Pub 20170043037, US Pub 20170327842, U.S. Pat. Nos. 10,006,007, 9,371,511, 9,012,219, US Pub 20180265848, US Pub 20170327842, US Pub 20180344838A1 at least at paragraphs [0260]-[0281], WO/2017/182524 for non-limiting embodiments of chemical modifications, wherein the content of each of which is hereby incorporated by reference in its entirety.

[0101] mRNAs delivered in LNP formulations have advantages over non-LNPs formulations. See US Pub 20180028645A1, WO/2018/081638, WO/2016/176330, wherein the content of each of which is incorporated by reference in its entirety.

[0102] In certain embodiments the nucleic acid encoding an envelope is operably linked to a promoter inserted an expression vector. In certain aspects the compositions comprise a suitable carrier. In certain aspects the compositions comprise a suitable adjuvant.

[0103] In certain aspects the invention provides an expression vector comprising any of the nucleic acid sequences of the invention, wherein the nucleic acid is operably linked to a promoter. In certain aspects the invention provides an expression vector comprising a nucleic acid sequence encoding any of the polypeptides of the invention, wherein the nucleic acid is operably linked to a promoter. In certain embodiments, the nucleic acids are codon optimized for expression in a mammalian cell, in vivo or in vitro. In certain aspects the invention provides nucleic acids comprising any one of the nucleic acid sequences of invention. In certain aspects the invention provides nucleic acids consisting essentially of any one of the nucleic acid sequences of invention. In certain aspects the invention provides nucleic acids consisting of any one of the nucleic acid sequences of invention. In certain embodiments the nucleic acid of the invention, is operably linked to a promoter and is inserted in an expression vector. In certain aspects the invention provides an immunogenic composition comprising the expression vector.

[0104] In certain aspects the invention provides a composition comprising at least one of the nucleic acid sequences of the invention. In certain aspects the invention provides a composition comprising any one of the nucleic acid sequences of invention. In certain aspects the invention provides a composition comprising at least one nucleic acid sequence encoding any one of the polypeptides of the invention.

[0105] In one embodiment, the nucleic acid is an RNA molecule. In one embodiment, the RNA molecule is transcribed from a DNA sequence described herein. In some embodiments, the RNA molecule is encoded by one of the inventive sequences. In another embodiment, the nucleotide sequence comprises an RNA sequence transcribed from a DNA sequence encoding any one of the polypeptide sequences of the invention, or a variant thereof or a fragment thereof. Accordingly, in one embodiment, the invention provides an RNA molecule encoding one or more of inventive envelopes. The RNA may be plus-stranded. Accordingly, in some embodiments, the RNA molecule can be translated by cells without needing any intervening replication steps such as reverse transcription.

[0106] In some embodiments, a RNA molecule of the invention may have a 5′ cap (e.g. but not limited to a 7-methylguanosine, 7mG(5′)ppp(5′)NlmpNp). This cap can enhance in vivo translation of the RNA. The 5′ nucleotide of a RNA molecule useful with the invention may have a 5′ triphosphate group. In a capped RNA this may be linked to a 7-methylguanosine via a 5′-to-5′ bridge. A RNA molecule may have a 3′ poly-A tail. It may also include a poly-A polymerase recognition sequence (e.g. AAUAAA) near its 3′ end. In some embodiments, a RNA molecule useful with the invention may be single-stranded. In some embodiments, a RNA molecule useful with the invention may comprise synthetic RNA.

[0107] The recombinant nucleic acid sequence can be an optimized nucleic acid sequence. Such optimization can increase or alter the immunogenicity of the envelope. Optimization can also improve transcription and/or translation. Optimization can include one or more of the following: low GC content leader sequence to increase transcription; mRNA stability and codon optimization; addition of a kozak sequence (e.g., GCC ACC) for increased translation; addition of an immunoglobulin (Ig) leader sequence encoding a signal peptide; and eliminating to the extent possible cis-acting sequence motifs (i.e., internal TATA boxes).

[0108] In certain aspects the invention contemplates using immunogenic compositions wherein immunogens are delivered as recombinant proteins. Various methods for production and purification of recombinant proteins, including trimers such as but not limited to SOSIP based trimers, suitable for use in immunization are known in the art. In certain embodiments recombinant proteins are produced in CHO cells.

[0109] It is readily understood that the envelope glycoproteins referenced in various examples and figures comprise a signal/leader sequence. It is well known in the art that HIV-1 envelope glycoprotein is a secretory protein with a signal or leader peptide sequence that is removed during processing and recombinant expression (without removal of the signal peptide, the protein is not secreted). See for example Li et al. Control of expression, glycosylation, and secretion of HIV-1 gp120 by homologous and heterologous signal sequences. Virology 204(1):266-78 (1994) (“Li et al. 1994”), at first paragraph, and Li et al. Effects of inefficient cleavage of the signal sequence of HIV-1 gp120 on its association with calnexin, folding, and intracellular transport. PNAS 93:9606-9611 (1996) (“Li et al. 1996”), at 9609. Any suitable signal sequence could be used. In some embodiments the leader sequence is the endogenous leader sequence. Most of the gp120 and gp160 amino acid sequences include the endogenous leader sequence. In other non-limiting examples, the leader sequence is human Tissue Plasminogen Activator (TPA) sequence, human CD5 leader sequence (e.g. MPMGSLQPLATLYLLGMLVASVLA (SEQ ID NO:9)). Most of the chimeric designs include CD5 leader sequence. A skilled artisan appreciates that when used as immunogens, and for example when recombinantly produced, the amino acid sequences of these proteins do not comprise the leader peptide sequences.

[0110] The immunogenic envelopes can also be administered as a protein prime and/or boost alone or in combination with a variety of nucleic acid envelope primes (e.g., HIV-1 Envs delivered as DNA expressed in viral or bacterial vectors).

[0111] Dosing of proteins and nucleic acids can be readily determined by a skilled artisan. A single dose of nucleic acid can range from a few nanograms (ng) to a few micrograms (m) or milligram (mg) of a single immunogenic nucleic acid. Recombinant protein dose can range from a few micrograms (μg) to a few hundred micrograms, or milligrams (mg) of a single immunogenic polypeptide.

[0112] Administration: The compositions can be formulated with appropriate carriers using known techniques to yield compositions suitable for various routes of administration. In certain embodiments the compositions are delivered via intramascular (IM), via subcutaneous, via intravenous, via nasal, via mucosal routes, or any other suitable route of immunization.

[0113] The compositions can be formulated with appropriate carriers and adjuvants using techniques to yield compositions suitable for immunization. The compositions can include an adjuvant, such as, for example but not limited to 3M052, alum, poly IC, MF-59 or other squalene-based adjuvant, ASOIB, or other liposomal based adjuvant suitable for protein or nucleic acid immunization. In certain embodiments, the adjuvant is GSK ASO IE adjuvant containing MPL and QS21. This adjuvant has been shown by GSK to be as potent as the similar adjuvant AS01B but to be less reactogenic using HBsAg as vaccine antigen (Leroux-Roels et al., IABS Conference, April 2013). In certain embodiments, TLR agonists are used as adjuvants. In other embodiment, adjuvants which break immune tolerance are included in the immunogenic compositions.

[0114] In certain embodiments, the compositions and methods comprise any suitable agent or immune modulation which could modulate mechanisms of host immune tolerance and release of the induced antibodies. In non-limiting embodiments modulation includes PD-1 blockade; T regulatory cell depletion; CD40L hyperstimulation; soluble antigen administration, wherein the soluble antigen is designed such that the soluble agent eliminates B cells targeting dominant epitopes, or a combination thereof. In certain embodiments, an immunomodulatory agent is administered in at time and in an amount sufficient for transient modulation of the subject's immune response so as to induce an immune response which comprises broad neutralizing antibodies against HIV-1 envelope. Non-limiting examples of such agents is any one of the agents described herein: e.g. chloroquine (CQ), PTP1B Inhibitor—CAS 765317-72-4—Calbiochem or MSI 1436 clodronate or any other bisphosphonate; a Foxo1 inhibitor, e.g. 344355 Foxo1 Inhibitor, AS1842856—Calbiochem; Gleevac, anti-CD25 antibody, anti-CCR4 Ab, an agent which binds to a B cell receptor for a dominant HIV-1 envelope epitope, or any combination thereof. In non-limiting embodiments, the modulation includes administering an anti-CTLA4 antibody, OX-40 agonists, or a combination thereof. Non-limiting examples are of CTLA-1 antibody are ipilimumab and tremelimumab. In certain embodiments, the methods comprise administering a second immunomodulatory agent, wherein the second and first immunomodulatory agents are different.

[0115] Multimeric Envelopes

[0116] Presentation of antigens as particulates reduces the B cell receptor affinity necessary for signal transduction and expansion (see Baptista et al. EMBO J. 2000 Feb. 15; 19(4): 513-520). Displaying multiple copies of the antigen on a particle provides an avidity effect that can overcome the low affinity between the antigen and B cell receptor. The initial B cell receptor specific for pathogens can be low affinity, which precludes vaccines from being able to stimulate and expand B cells of interest. In particular, very few naïve B cells from which HIV-1 broadly neutralizing antibodies arise can bind to soluble HIV-1 Envelope. Provided are envelopes, including but not limited to trimers as particulate, high-density array on liposomes or other particles, for example but not limited to nanoparticles. See e.g. He et al. Nature Communications 7, Article number: 12041 (2016), doi:10.1038/ncomms12041; Bamrungsap et al. Nanomedicine, 2012, 7 (8), 1253-1271.

[0117] For development as a vaccine immunogen, we have also created multimeric nanoparticles that comprise and/or display HIV envelope protein or fragments on their surface.

[0118] The nanoparticle immunogens are composed of various forms of HIV-envelope protein, e.g. without limitation envelope trimer, and self-assembling protein, e.g. without limitation ferritin protein. Any suitable ferritin could be used in the immunogens of the invention. In non-limiting embodiments, the ferritin is derived from Helicobacter pylori. In non-limiting embodiments, the ferritin is insect ferritin. In non-limiting embodiments, each nanoparticle displays 24 copies of the envelope protein on its surface.

[0119] Presenting multiple copies of antigens to B cells has been a longstanding approach to improving B cell receptor recognition and antigen uptake (See Batista et al. EMBO J. 2000 Feb. 15; 19(4): 513-520). The improved recognition of antigen is due to the avid interaction of multiple antigens with multiple B cell receptors on a single B cells, which results in clustering of B cells and stronger cell signaling. Furthermore, multimeric presentation improves antigen binding to mannose binding lectin which promotes antigen trafficking to B cell follicles. Self-assembling complexes comprising multiple copies of an antigen are one strategy of immunogen design approach for arraying multiple copies of an antigen for recognition by the B cell receptors on B cells (Kanekiyo, M., Wei, C. J., Yassine, H. M., McTamney, P. M., Boyington, J. C., Whittle, J. R., Rao, S. S., Kong, W. P., Wang, L., and Nabel, G. J. (2013). Self-assembling influenza nanoparticle vaccines elicit broadly neutralizing H1N1 antibodies. Nature 499, 102-106; Ueda, G., Antanasijevic, A., Fallas, J. A., Sheffler, W., Copps, J., Ellis, D., Hutchinson, G. B., Moyer, A., Yasmeen, A., Tsybovsky, Y., et al. (2020). Tailored design of protein nanoparticle scaffolds for multivalent presentation of viral glycoprotein antigens. Elife).

[0120] In some instances, the gene of an antigen can be fused via a linker/spacer to a gene of a protein which could self-assemble. Upon translation, a fusion protein is made that can self-assemble into a multimeric complex—also referred to as a nanoparticle displaying multiple copies of the antigen. In other instances, the protein antigen could be conjugated to the self-assembling protein via an enzymatic reaction, thereby forming a nanoparticle displaying multiple copies of the antigen. Non-limiting embodiments of enzymatic conjugation include without limitation sortase mediated conjugation. In some embodiments, linkers for use in any of the designs of the invention could be 2-50 amino acids long, e.g. 2, 3, 4, 5, 6, 7, 8, 9, 10, 11, 12, 13, 14, 15, 16, 17, 18, 19, 20, 25, 30, 35, 40, 45, or 50 amino acids long. In certain embodiments, these linkers comprise glycine and serine amino acid in any suitable combination, and/or repeating units of combinations of glycine, serine and/or alanine.

[0121] Ferritin is a well-known protein that self-assembles into a hollow particle composed of repeating subunits. In some species ferritin nanoparticles are composed of 24 copies of a single subunit, whereas in other species it is composed of 12 copies each of two subunits.

[0122] Non-limiting embodiments of sortase linkers could be used so long as their position allows multimerization of the envelopes. In a non-limiting embodiment, a C-terminal tag is LPXTG (SEQ ID NO: 10), where X signifies any amino acid but most commonly Ala, Ser, Glu, or a N-terminal pentaglycine repeat tag is added to the envelope trimer gene. In a non-limiting embodiment, a C-terminal tag is LPXTGG (SEQ ID NO: 196), where X signifies any amino acid but most commonly Ala, Ser, Glu.

[0123] To improve the interaction between the naïve B cell receptor and immunogens, envelope designed can be created to wherein the envelope is presented on particles, e.g. but not limited to nanoparticle. In some embodiments, the HIV-1 Envelope trimer could be fused to ferritin. Ferritin protein self assembles into a small nanoparticle with three fold axis of symmetry. At these axes the envelope protein is fused. Therefore, the assembly of the three-fold axis also clusters three HIV-1 envelope protomers together to form an envelope trimer. Each ferritin particle has 8 axes which equates to 8 trimers being displayed per particle. See e.g. Sliepen et al. Retrovirology 2015 12:82, DOI: 10.1186/s12977-015-0210-4.

[0124] Any suitable ferritin sequence could be used. In non-limiting embodiments, ferritin sequences are disclosed in WO/2018/005558.

[0125] Ferritin nanoparticle linkers: The ability to form HIV-1 envelope ferritin nanoparticles relies self-assembly of 24 ferritin subunits into a single ferritin nanoparticle. The addition of a ferritin subunit to the c-terminus of HIV-1 envelope may interfere with the ability of the ferritin subunit to fold properly and or associate with other ferritin subunits. When expressed alone ferritin readily forms 24-subunit nanoparticles, however appending it to envelope only yields nanoparticles for certain envelopes. Since the ferritin nanoparticle forms in the absence of envelope, the envelope could be sterically hindering the association of ferritin subunits. Thus, ferritin can be designed with elongated glycine-serine linkers to further distance the envelope from the ferritin subunit. To make sure that the glycine linker is attached to ferritin at the correct position, constructs can be created that attach at second amino acid position or the fifth amino acid position. The first four n-terminal amino acids of natural Helicobacter pylori ferritin are not needed for nanoparticle formation but may be critical for proper folding and oligomerization when appended to envelope. Thus, constructs can be designed with and without the leucine, serine, and lysine amino acids following the glycine-serine linker. The goal will be to find a linker length that is suitable for formation of envelope nanoparticles when ferritin is appended to most envelopes. Any suitable linker between the envelope and ferritin could be uses, so long as the fusion protein is expressed and the trimer is formed.

[0126] Another approach to multimerize expression constructs uses Staphylococcus sortase A transpeptidase ligation to conjugate inventive envelope trimers to cholesterol. The trimers can then be embedded into liposomes via the conjugated cholesterol. To conjugate the trimer to cholesterol either a C-terminal LPXTG (SEQ ID NO:10) tag, where X signifies any amino acid but most commonly Ala, Ser, Glu, or a N-terminal pentaglycine repeat tag is added to the envelope trimer gene. Cholesterol is also synthesized with these two tags. Sortase A is then used to covalently bond the tagged envelope to the cholesterol. The sortase A-tagged trimer protein can also be used to conjugate the trimer to other peptides, proteins, or fluorescent labels. In non-limiting embodiments, the sortase A tagged trimers are conjugated to ferritin to form nanoparticles. See FIG. 18.

[0127] The invention provides design of envelopes and trimer designs wherein the envelope comprises a linker which permits addition of a lipid, such as but not limited to cholesterol, via a sortase A reaction. See e.g. Tsukiji, S. and Nagamune, T. (2009), Sortase-Mediated Ligation: A Gift from Gram-Positive Bacteria to Protein Engineering. ChemBioChem, 10: 787-798. doi:10.1002/cbic.200800724; Proft, T. Sortase-mediated protein ligation: an emerging biotechnology tool for protein modification and immobilisation. Biotechnol Lett (2010) 32: 1. doi:10.1007/s10529-009-0116-0; Lena Schmohl, Dirk Schwarzer, Sortase-mediated ligations for the site-specific modification of proteins, Current Opinion in Chemical Biology, Volume 22, October 2014, Pages 122-128, ISSN 1367-5931, dx.doi.org/10.1016/j.cbpa.2014.09.020; Tabata et al. Anticancer Res. 2015 August; 35(8):4411-7; Pritz et al. J. Org. Chem. 2007, 72, 3909-3912.

[0128] The lipid modified envelopes and trimers could be formulated as liposomes. Any suitable liposome composition is contemplated.

[0129] Non-limiting embodiments of envelope designs for use in sortase A reaction are shown in FIG. 24 B-D of WO2017/151801, incorporated by reference in its entirety.

[0130] Additional sortase linkers could be used so long as their position allows multimerization of the envelopes. In a non-limiting embodiment, a C-terminal tag is LPXTG (SEQ ID NO:10), where X signifies any amino acid but most commonly Ala, Ser, Glu, or a N-terminal pentaglycine repeat tag is added to the envelope trimer gene. In a non-limiting embodiment, a C-terminal tag is LPXTGG (SEQ ID NO: 196), where X signifies any amino acid but most commonly Ala, Ser, Glu.

[0131] Table 1 shows a summary of sequences described herein.

| | Amino acid (aa) or nucleic | | |
|---|---|---|---|
| Name | acid (nt) | Design | Figure/Note |
| HV1301580_D230N_H289N_P291S; | Nt | | FIG. 19A |
| CH848.3.D1305.10.19_D949V3.DS.SOSIP_D230N_H289N_P291S | aa | | FIG. 19B |
| (glycan hole filled) | | | |
| >HV1301502_D1305V1; | Nt | | FIG. 19A |
| JRFL_SOSIPv6_V1_PNGS_D1305V1 | aa | | FIG. 19B |
| (V1 loop from 10.19) | | | |
| >HV1301405_D1305V1; CON- | Nt | | FIG. 19A |
| Schim.6R.DS.SOSIP.664_OPT_D1305V1 | aa | | FIG. 19B |
| (V1 loop from 10.19 isolate) | | | |
| >HV1301580_D230N_H289N_P291S; | Nt | | FIG. 19A |
| CH848.3.D1305.10.19_D949V3.DS.SOSIP_D230N_H289N_P291S | aa | | FIG. 19B |
| (glycan holes filled) | | | |
| >HV1301580; | Nt | 19CV3 | FIG. 19A |
| CH848.3.D1305.10.19_D949V3.DS.SOSIP | aa | | FIG. 19B |
| (19CV3) | | | |
| >HV1301509; | Nt | | FIG. 19A |
| CH0848.3.d1305.10.19gp160 | aa | | FIG. 19B |
| >HV1301503; | Nt | | FIG. 19A |
| CH848.3.D1305.10.19ch.DS.SOSIP.664 | aa | | FIG. 19B |
| >HV1301504; | Nt | | FIG. 19A |
| CH848.3.D1305.10.19ch.SOSIPv6 | aa | | FIG. 19B |
| >HV1301580_C_SORTA; | Aa | | FIG. 19C |
| CH848.3.D1305.10.19_D949V3.DS.SOSIP_C_SORTA | nt | | FIG. 19C |

[0132] Table 2 shows a summary of modifications to envelopes described herein

| | | | | V3 glycosylation | UCA and other |
|---|---|---|---|---|---|
| Row | Envelope | Figure/SEQ ID No | V1 region | sites | Ab binding |
| 1 | 10.17 | See PCT | 17aa | N301 and N332 | |
| | | Publication | | | |
| | | WO2018161049 | | | |
| 2 | 10.17 DT | See PCT | 17aa N133D | N301 and N332 | DH270UCA |
| | | Publication | N138T | | |
| | | WO2018161049 | effectively lacks | | |
| | | | glycosylation | | |
| | | | sites | | |
| 3 | 10.19 | FIG. 19 | 17aa V1 region | No glycosylation | CH01 UCA |
| | | | lacks N133 and | sites at N295, | |
| | | | N138 | N301, N332 | |
| | | | glycosylation | | |
| | | | sites | | |
| 4 | 10.19 plus V3 | FIG. 19 | 17aa V1 region | Add V3 regions | CH01 UCA |
| | loop of 10.17 | | lacks N133 and | from 10.17 has | DH270UCA |
| | (19CV3) | | N138 | five aa difference | VRC26 UCA |
| | | | glycosylation | from 10.19 | |
| | | | sites | | |
| 5 | 10.19 env | FIG. 19 | | At least changes | |
| | based with | | | #2, 4, 5, and/or | |
| | fewer than | | | “GDIR” (SEQ ID | |
| | five aa | | | NO: 1) sequence | |
| | changes | | | | |
| | compared to | | | | |
| | 19CV3; | | | | |
| | “GDIR/K” | | | | |
| 6 | Ferritin | FIG. 19 | | | |
| | Linker | | | | |
| 7 | E169K | FIG. 19 | | | |
| 8 | Glycan hole | FIG. 19 | | | |
| | filled | | | | |

[0133] DH270 light chain binds to N301 glycan. In some embodiments, a N301 gly site is used (e.g. change #2 in row 5 of Table 2, supra).

[0134] DH270 heavy chain binds to N332 glycan. In some embodiments, a N332 gly site is used (e.g. changes #4 and #5 in row 5 of Table 2, supra).

[0135] V3 glycan Abs bind GDIR (SEQ ID NO:1). In some embodiments, a change #3 to “GDIR” (SEQ ID NO:1) is needed (e.g. “GDIR” sequence (SEQ ID NO:1) in row 5 of Table 2, supra).

[0136] GDIR/K motif: V3-glycan broadly neutralizing antibodies typically contact the c-terminal end of the third variable region on HIV-1 envelope. There are four amino acids, Gly324, Asp325, Ile326, and Arg327, bound by V3-glycan neutralizing antibodies. While Arg327 is highly conserved among HIV-1 isolates, Lys327 also occurs at this site. The CH848.3.D0949.10.17 isolate naturally encodes the less common Lys327. In contrast to CH848.3.D0949.10.17 with the Lys327, the precursor antibody of the DH270 V3-glycan broadly neutralizing antibody lineage barely binds to CH848.3.D0949.10.17 encoding Arg327. Thus, Arg327 is critical for the precursor to bind and the lineage of neutralizing antibodies to begin maturation. However, somatically mutating antibodies on the path to developing neutralization breadth bind better to Env encoding Arg327. See FIG. 14. Thus, Env must encode Lys327 to initiate DH270 lineage development. However, to best interact with affinity maturing DH270 lineage members the Env should encode Arg327. Thus, a plausible vaccine regimen to initiate and select for developing bnAbs would include a priming immunogen encoding, Lys327 and a boosting immunogen encoding Arg327. The Arg327 boosting immunogen would optimally target the affinity maturing DH270 lineage members, while not optimally binding the DH270 antibodies that lack affinity maturation. Non-limiting embodiments of vaccination regimens could include: priming with CH848.3.D0949.10.17 based envelope design also with Lys327, followed by administering of CH848.3.D0949.10.17 based envelope design with Arg327. Non-limiting embodiments of vaccination regimens could include: priming with 19CV3 based envelope design also with Lys327, followed by administering of CH848.3.D0949.10.17 based envelope design with Arg327.

[0137] E169K modification: One approach to designing a protective HIV-1 vaccine is to elicit broadly neutralizing antibodies (bnAbs). However, bnAbs against two or more epitopes will likely need to be elicited to prevent HIV-1 escape. Thus, optimal HIV-1 immunogens should be antigenic for multiple bnAbs in order to elicit bnAbs to more than one epitope. The CH848.D949.10.17 HIV-1 isolate was antigenic for V3-glycan antibodies but lacked binding to V1V2-glycan antibodies. Not all viruses from the CH848 individual lacked binding to V1V2-glycan antibodies. For example, the CH848.D1305.10.19 isolate bound well to V1V2-glycan antibody PGT145. We compared the sequence of CH848.D949.10.17 and CH848.D1305.10.19 in the region that is contacted by V1V2-glycan antibodies in crystal structures (McLellan J S, Pancera M, Carrico C, Gorman J, Julien J P, Khayat R, et al. Structure of HIV-1 gp120 V1/V2 domain with broadly neutralizing antibody PG9. Nature. 2011; 480(7377):336-43). Interestingly, the CH848.D949.10.17 and CH848.D1305.10.19 differed in sequence at a known contact site for V1V2-glycan antibodies—position 169 (Doria-Rose N A, Georgiev I, O'Dell S, Chuang G Y, Staupe R P, McLellan J S, et al. A short segment of the HIV-1 gp120 V1/V2 region is a major determinant of resistance to V1/V2 neutralizing antibodies. J Virol. 2012; 86(15):8319-23). It has been previously shown that mutation of lysine at position 169 eliminates binding to V1V2-glycan antibody PG9 (Doria-Rose N A, Georgiev I, O'Dell S, Chuang G Y, Staupe R P, McLellan J S, et al. A short segment of the HIV-1 gp120 V1/V2 region is a major determinant of resistance to V1/V2 neutralizing antibodies. J Virol. 2012; 86(15):8319-23). CH848.D1305.10.19 sequence encoded a lysine at position 169 whereas CH848.D949.10.17 sequence encoded a glutamate. Thus, we changed the glutamate (E) to lysine (K) at position 169 of CH848.D949.10.17. This single change in CH848.D949.10.17 enabled V1V2-glycan antibody binding to the envelope. Thus, the E169K adds the V1V2-glycan epitope to the other bnAb epitopes present on CH848.D949.10.17-based envelopes. Overall, the result of the E169K is a CH848.D949.10.17 envelope capable of eliciting more different types of bnAbs.

[0138] The invention contemplates any other design, e.g. stabilized trimer, of the sequences described here in. For non-limiting embodiments of additional stabilized trimers see WO2014/042669 (DU4061), WO2017/151801 (DU4716), WO2017/152146 (DU4918), WO2018/161049 (DU4918), and WO/2020/072169 (F14 and/or VT8 designs) all of which are incorporated by reference in their entirety.

[0139] In certain embodiments the invention provides an envelope comprising 17aa V1 region without N133 and N138 glycosylation, and N301 and N332 glycosylation sites, and further comprising “GDIR” motif (SEQ ID NO: 1), wherein the envelope binds to UCAs of V1V2 Abs and V3 Abs.

TABLE 3
Summary of envelope designs.

| | | | | Figure with a |
|---|---|---|---|---|
| | | | | non-limiting |
| HV | Envelope to be used as protein and/or | Linker | Ferritin for | sequence |
| name | mRNA | sequence | multimerization | embodiment |
| HV1302144 | 10.17 DTe protein trimer | no | No | FIG. 1B, 1F |
| | CH848.3.D0949.10.17_N133D_N138T_D230N_H289N_P291S_E169K_{—} | | | |
| | DS.chSOSIP | | | |
| HV1302144_cSortA | 10.17 DTe protein sortaNP | For Sortase | Any | |
| | CH848.3.D0949.10.17_N133D_N138T_D230N_H289N_P291S_E169K_{—} | conjugation | Ferritin is | |
| | DS.chSOSIP_cSortA | | added via | |
| | | | Sortase | |
| | | | conjugation | |
| | | | at C- | |
| | | | terminus | |
| HV1301925 | 10.17 DTe protein NP | SGG | could be | FIG. 1A, 1E |
| | CH848.3.D0949.10.17_N133D_N138T_D230N_H289N_P291S_E169K_{—} | | any | |
| | DS.chSOSIP_VRCferritin | | suitable | |
| | | | ferritin | |
| | 10.17WTe designs | | | |
| HV1302145 | 10.17WTe protein trimer | no | | FIG. 1C, 1G |
| | CH848.3.D0949.10.17_D230N_H289N_P291S_E169K_DS.chSOSIP | | | |
| HV1302145_cSortA | CH848.3.D0949.10.17_D230N_H289N_P291S_E169K_DS.chSOSIP_cSortA | For Sortase | Any | |
| | | conjugation | Ferritin is | |
| | | | added via | |
| | | | Sortase | |
| | | | conjugation | |
| | | | at C- | |
| | | | terminus | |
| HV1302146 | CH848.3.D0949.10.17_D230N_H289N_P291S_E169K_DS.chSOSIP_{—} | SGG | could be | FIG. 1D, 1H |
| | VRCferritin | | any | |
| | | | suitable | |
| | | | ferritin | |

TABLE 4
Summary of selection of immunogens for induction of neutralizing antibodies.

| | | NEW selection | One embodiment | Figures | Envelope protomer |
|---|---|---|---|---|---|
| prime | | CH848.0949.10.17DT | See Table 3, see | | Various protomer |
| | | Or | FIG. 1I | | designs, including |
| | | CH848.0949.10.17DTe | | | without limitation various |
| | | | | | stabilized designs. |
| boost | x | CH848.0949.10.17 | See Table 3, see | | Various protomer |
| | | or | FIG. 1I | | designs, including |
| | | CH848.0949.10.17WTe | | | without limitation various |
| | | | | | stabilized designs. |
| boost | | CH848.0808.15.15 | CH0848.3.d0808.15.15.MB | See Fig. | CH0848.3.d0808.15.15.MB |
| | | | 6R.DS.SOSIP.664_CD5ss | 2C | 6R.DS.SOSIP.664 |
| | | | | | With various signal |
| | | | | | peptides |
| | | | | | Various protomer |
| | | | | | designs, including |
| | | | | | without limitation various |
| | | | | | stabilized designs. |
| boost | x | CH848.0358.80.06 | | See Fig. | |
| | | | | 3U | |
| boost | x | CH848.1432.5.41 | | See Fig. | |
| | | | | 3U | |
| boost | | CH848.1621.4.44 | CH0848.3.d1621.4.44 | See Fig. | CH0848.3.d1621.4.44 |
| | | | 6R.DS.SOSIP.664_CD5ss | 2C | 6R.DS.SOSIP.664 |
| | | | | | With various signal |
| | | | | | peptides |
| | | | | | Various protomer |
| | | | | | designs, including |
| | | | | | without limitation various |
| | | | | | stabilized designs |
| boost | | CH848.1305.10.35 | CH0848.3.d1305.10.35 | See Fig. | CH0848.3.d1305.10.35 |
| | | | 6R.DS.SOSIP.664_CD5ss | 2C | 6R.DS.SOSIP.664 |
| | | | | | With various signal |
| | | | | | peptides |
| | | | | | Various protomer |
| | | | | | designs, including |
| | | | | | without limitation various |
| | | | | | stabilized designs |
| boost | | P0402.c2.11 (G) | | See Fig. | Various protomer |
| | | | | 2C | designs, including |
| | | | | | without limitation various |
| | | | | | stabilized designs |
| boost | | ZM246F (C) | | See Fig. | Various protomer |
| | | | | 2C | designs, including |
| | | | | | without limitation various |
| | | | | | stabilized designs |

(x) indicates non-limiting embodiments of boost envelopes described in Example 1.

[0140] Throughout the specification, the name CH848.d0949.10.17 DT is interchangeably used as CH848.d0949.10.17.N133D.N138T. Throughout the specification, the name CH848.d0949.10.17 is interchangeably used as CH848.d0949.10.17WT. In certain embodiments, CH848.d0949.10.17DT envelope comprises additional modifications D230N.H289N.P291S.E169K and is referred to as CH848.d0949.10.17 DTe. In certain embodiments, CH848.d0949.10.17 envelope comprises additional modifications D230N.H289N.P291S.E169K and is referred to as CH848.d0949.10.17WTe.

[0141] Any suitable signal peptide could be used. In designs comprising ferritin for multimerization, any suitable linker could be used between the envelope sequence and a ferritin sequence. When recombinantly produced, proteins do not comprise a signal peptide which is cleaved during recombinant protein production.

### EXAMPLES

### Example 1

[0142] This example provides analyses and selection of a new set of immunogens for induction of HIV-1 neutralizing antibodies.

[0143] Vaccines that can induce anti-HIV-1 broadly neutralizing antibodies (bNAbs) remain highly sought after as they will induce broad protective responses that will prevent infection by the globally diverse HIV-1 strains. We and others have shown that such bNAbs arise in HIV-1 infected individuals through multiple rounds of virus escape followed by antibody hypermutation to learn recognition of these escaped viruses (e.g. Bonsignori et al. Sci Transl Med 2017 Mar. 15; 9(381):eaai7514. doi: 10.1126/scitranslmed.aai7514, PMID: 28298420). In this application we outline the selection of a set of sequential immunogens that are designed to mimic this process through vaccination.

[0144] In Bonsignori et al., PMID: 28298420 we reported the development of DH270.6, a bNAb targeting V3 glycan epitope, in the HIV-1 infected individual CH848. This antibody lineage was traced to identify intermediates along the evolutionary trajectory, and several viruses from CH848 were tested for neutralization against these intermediate and mature bNAbs.

[0145] In this work, we first identified signatures, defined as amino acids, glycan sites and hypervariable loop characteristics that are statistically associated with sensitivity or resistance to DH270 lineage Abs (Bricault et al. Cell Host Microbe. 2019 Jan. 9; 25(1):59-72.e8. doi: 10.1016/j.chom.2018.12.001. PMID: 30629920). These signatures were calculated for both CH848 viruses as well as global HIV-1 viruses.

[0146] We found that six positions (HXB2: 230, 241, 300, 301, 325 & 328) and hypervariable V1 loop lengths were statistically significant signatures that were overlapping between the two analyses. We hypothesize that these common signature sites of viral sensitivity/escape against DH270 antibodies in the CH848 patient viruses as well as global HIV-1 viruses are key positions at which CH848 viral evolution “teaches” the DH270 lineage to recognize heterologous HIV-1 diversity. See FIGS. 4-8.

[0147] In FIG. 5 and throughout FIGS. 4-8 and Example 1, where reference is made to education sites or signature sites or signature amino acids, amino acids are represented adjacent to each other. These adjacent amino acids do not represent a continuous peptide, but rather amino acids at the signature sites positions: 230, 241, 300, 301, 325 and 328.

[0148] Analyses of the longitudinal evolution of CH848 envelopes showed that TF variants associated with resistance to early Abs at sites 230 & 300. These evolve to sensitive variants 779-1119 days post infection, with a timeline for IA4˜779-892 days post infection. Relapse to NxST-230 is never at high frequency, but at low frequency at day 948. IA2 likely arises. Day 1304-1634 onwards we start seeing escape at 241, 300, 301, 325, 328 towards breadth gain variants. IA1 likely arises. Day 1650 onwards Y-300 becomes dominant, and full resistance associated H-301 and N-325 become more prevalent. DH270.6 likely arises.

[0149] Analyses of bnAb education sites show the following. IA4-sensitive: CH848.d0949.10.17 matches all sensitive variants. Only autologous signatures are G-336 and L-337 sensitive. 10.17 does not match these (E-336 K-337). IA2 breadth gain: 230 NxST associated with IA2 breadth gain (only autologous). E-325 is quite rare in heterologous viruses. IA1 breadth gain: Breadth gain variants: K-241, G/Y-300 & K-328. N-325 recognized at very low frequency. DH270.6/.4 gain: Y-300 & K-328 are better recognized. N-325 is still rarely recognized. Resistance to all DH270 lineage: Main routes of escape loss of NxST301 & N325 (heterologous only NxST-332 viruses considered).

[0150] Position N300 has structural relevance. IA4 and IA2 both require Asn-300 but later lineage members can tolerate G/Y. N-300 forms a polar contact with N-302. N300G or N300Y could disrupt this, and potentially change orientation of 301 glycan. 301 glycan is important: critical and improbable mutations might interact S27Y, Y93F (light) and G110Y (heavy). NxST 442 is quite rare in M-group.

[0151] Structural relevance of positions Q328 and D325 have. For Q328K: A4 & IA2 prefer Q-328. IA1 begins to see K-328 and DH270.6 can tolerate Q & K equally. Q-328 forms a polar contact with T-148. So Q-328 be involved in sequestering V1 loop away from V3. IA1 onwards longer V1 loops are tolerated. For D325N: D-325 strictly required IA4 & IA2. N-325 is rarely tolerated by IA1 & DH270.6, and enriched in viruses resistant to all DH270 Abs. D325 inserts between CDRH2 & CDRH3, could have made contacts, but does not. Closest Ab aa is D107. R-57 is not close (˜9 Å).

[0152] IA1 breadth gain loop signatures: Hyp V1+V2 length significantly associated in both heterologous and autologous datasets (p=0.0002-0.0033). IA4 & IA2 in autologous dataset recognize very small loops, but IA1 onwards can tolerate longer loops.

[0153] For CH848 viruses, dramatic length change for V1, but very little for V2.

[0154] Previous immunogen design including envelopes 10.17DT, d0948.10.17, d0835.10.31, d0357.80.06, d1431.5.41, d0525.25.02 missed patterns Y-300, N-325 & K-241. See FIG. 6.

[0155] FIG. 7 shows one embodiments of a new immunogen design based on neutralization profiles and coverage of key breadth-gain and resistance signatures. Three immunogens from previous design were retained: d949.10.17, d358.80.06 and d1432.5.41. Three new immunogens are added: D808.15.15 introduces NxST-230; d1621.4.44 introduces Y-300; d1305.10.35 introduces N-325. No suitable Envs with K-241 found—either too short or too long V1. It is rare in M-group, so this position was ignored. Table 4 and FIGS. 1-3 show non-limiting examples of these envelopes.

[0156] We used this hypothesis to guide the selection of seven CH848 Envs that not only show appropriate neutralization profiles against DH270 Abs but also expose critical amino acids at the above 6 positions and appropriate hypervariable V1 loops in a sequential manner that upon vaccination are designed to initiate and mature antibody responses similar to DH270. These Envs are: 1) CH848.d0949.10.17 DT, 2) CH848.d0949.10.17, 3) CH848.d0808.15.15, 4) CH848.d0358.80.06, 5) CH848.d1432.5.41, 6) CH848.d1621.4.44 and 7) CH848.d1305.10.35.

[0157] We have also calculated signatures that are associated with restricting the breadth of the broadest DH270 Ab (DH270.6), and have chosen two natural Envs (P0402.c2.11 and ZM246F) that expose such resistant signatures at sites 325 and 301, respectively, with the rationale that boosting with these two Env immunogens could induce DH270-like Abs that can show higher breadth than DH270.6. See FIG. 8.

[0158] In the Figures for this example and in this example, the term “global” panel is the same as “heterologous” panel. The heterologous viruses refers to a standard panel of 208 global circulating Envs made as pseudotyped viruses that is used for testing neutralization breadth and potency of antibodies. This was the same panel that was used in Bonsignori et al. Sci Transl Med 2017 Mar. 15; 9(381):eaai7514. doi: 10.1126/scitranslmed.aai7514, PMID: 28298420. The “autologous” panel is the 90 pseudovirus panel made using strategically chosen longitudinal CH848 Envs from Bonsignori et al. (PMID: 28298420).

[0159] In the figures in this example, the phylogenetic correction refers to a particular strategy that accounts for potential biases arising from Glade effects in signature calculations, as described in previous publications (Bhattacharya et al. Science. 2007 Mar. 16; 315(5818):1583-6. doi: 10.1126/science.1131528. PMID: 17363674; Bricault et al. Cell Host Microbe. 2019 Jan. 9; 25(1):59-72.e8. doi: 10.1016/j.chom.2018.12.001. PMID: 30629920).

[0160] The symbol “O” is a short-hand of indicating an Asparagine in a potential N-linked glycosylation site motif (Asn-x-Ser/Thr, where x is any amino acid other than Pro). “N” refers to Asn not in such motifs.

[0161] The envelope selection is based on comparison of heterologous and autologous signatures to find overlap. This analysis identified 6 sites that have similar patterns across DH270 Abs between heterologous and autologous datasets—bNAb education. Based on these analyses, we designed a set of immunogens.

[0162] Below tables shows DH270 UCA knock-in mice for immunization studies. The immunogens could have any suitable envelope design, e.g, without limitation envelope trimer, envelope comprised in a nanoparticle, so forth. Immunogens could be delivered in any suitable form, including without limitation proteins, nucleic acids, e.g. mRNA, formulation in any adjuvant. In non-limiting embodiments, the envelopes are be delivered as nanoparticles, trimers, and/or nucleic acids.

TABLE 5
DH270 UCA knock-in mice for immunization studies. The immunogens could have any suitable
envelope design, e.g, without limitation envelope trimer, envelope comprised in a nanoparticle,
so forth. Immunogens could be delivered in any suitable form, including without limitation
proteins, nucleic acids, e.g. mRNA, formulation in any adjuvant.

| Study | 1 | 2 | 3 | 4 | 5 | 6 | 7 | 8 |
|---|---|---|---|---|---|---|---|---|
| New #1 | 10.17DT | 10.17DT | 10.17DT | 10.17WT | 15.15 | 80.06 | 5.41 | 5.41 |
| | NP | NP | NP | trimer | trimer | trimer | 4.44 | 4.44 |
| | | | | | | | trimers | 10.35 |
| | | | | | | | | P0402 |
| | | | | | | | | ZM246 |
| New #2 | 10.17DT | 10.17DT | 10.17DT | 10.17WT | 10.17WT | 10.17WT | 10.17WT | 5.41 |
| | NP | NP | NP | 15.15 | 15.15 | 15.15 | 15.15 | 4.44 |
| | | | | 80.06 | 80.06 | 80.06 | 80.06 | P0402 |
| | | | | 5.41 | 5.41 | 5.41 | 5.41 | 10.35 |
| | | | | 4.44 | 4.44 | 4.44 | 4.44 | ZM246 |
| New #3 | 10.17DT | 10.17DT | 10.17DT | 10.17WT | 15.15 | 80.06 | 5.41 | 5.41 |
| | NP | NP | 10.17WT | 15.15 | 80.06 | 5.41 | 4.44 | 4.44 |
| | | | | | | 4.44 | P0402 | P0402 |
| | | | | | | | | 10.35 |
| | | | | | | | | ZM246 |

TABLE 6
One embodiment of a mouse study. In this study 5.41 and 4.44 are grouped together as
they show similar neutralization profiles (only sensitive to IA1 & DH270.6). Envelope
10.35 (N-325) and the two heterologous viruses come at the last step. Studies can compare
Ab responses before and after this to study the impact of these immunogens designed to go
beyond DH270.6. Envelopes 5.41 & 4.44 also included so that the more resistant viruses
(10.35 + 2 het) could drive off-target responses. An alternative is where the 8^{th}
immunization is a repeat of 7^{th}, and 9^{th} is 10.35 & 2 heterologous envelopes.

| Study | 1 | 2 | 3 | 4 | 5 | 6 | 7 | 8 |
|---|---|---|---|---|---|---|---|---|
| New #1 | 10.17DT | 10.17DT | 10.17DT | 10.17WT | 15.15 | 80.06 | 5.41 | 5.41 |
| | NP | NP | NP | trimer | trimer | trimer | 4.44 | 4.44 |
| | | | | | | | trimers | 10.35 |
| | | | | | | | | P0402 |
| | | | | | | | | ZM246 |

TABLE 7
One embodiment of an animal study. In this study, immunogens from 10.17 WT (for IA4 targeting)
to 4.44 (IA1 & DH270.6 targeting) co-delivered 4 times to test if boosting with mixture can
lead to better Ab responses (compared with New #1). Final step is for going beyond DH270.6.

| Study | 1 | 2 | 3 | 4 | 5 | 6 | 7 | 8 |
|---|---|---|---|---|---|---|---|---|
| New #2 | 10.17DT | 10.17DT | 10.17DT | 10.17WT | 10.17WT | 10.17WT | 10.17WT | 5.41 |
| | NP | NP | NP | 15.15 | 15.15 | 15.15 | 15.15 | 4.44 |
| | | | | 80.06 | 80.06 | 80.06 | 80.06 | P0402 |
| | | | | 5.41 | 5.41 | 5.41 | 5.41 | 10.35 |
| | | | | 4.44 | 4.44 | 4.44 | 4.44 | ZM246 |

TABLE 8
One embodiment of an animal study. In this embodiment each boost designed
to target 2 Ab intermediates in each step. (e.g. 3^{rd} boost for UCA + IA4, 4^{th}
boost for IA4 & IA2, etc.) The 7^{th} boost - P0402 is included before 10.35 (which
is in 8^{th} immunization) because P0402 sensitive to both IA1 & DH270.6,
while 10.35 only for DH270.6 (UG021 completely resistant).

| Study | 1 | 2 | 3 | 4 | 5 | 6 | 7 | 8 |
|---|---|---|---|---|---|---|---|---|
| New #3 | 10.17DT | 10.17DT | 10.17DT | 10.17WT | 15.15 | 80.06 | 5.41 | 5.41 |
| | NP | NP | 10.17WT | 15.15 | 80.06 | 5.41 | 4.44 | 4.44 |
| | | | | | | 4.44 | P0402 | P0402 |
| | | | | | | | | 10.35 |
| | | | | | | | | ZM246 |

TABLE 9
Summary of DH270 UCA knock-in mice immunization studies

| Study | 1 | 2 | 3 | 4 | 5 | 6 | 7 | 8 |
|---|---|---|---|---|---|---|---|---|
| MU445 | 10.17DT | 10.17DT | 10.17DT | 10.17DT | 10.17DT | 10.17DT | | |
| | NP | NP | NP | NP | NP | NP | | |
| MU486 | 10.17DT | 10.17DT | 10.17DT | 10.17WT | 10.31 | 80.06 | 5.41 | 25.02 |
| Group | NP | NP | NP | trimer | trimer | trimer | trimer | trimer |
| 1 | | | | | | | | |
| MU486 | 10.17DT | 10.17DT | 10.17DT | 10.17WT | 10.17WT | 10.17WT | 10.17WT | 10.17WT |
| Group | NP | NP | NP | trimer | trimer | trimer | trimer | trimer |
| 2 | | | | | | | | |
| New | 10.17DT | 10.17DT | 10.17DT | 10.17WT | 15.15 | 80.06 | 5.41 | 5.41 |
| imm #1 | NP | NP | NP | trimer | trimer | trimer | 4.44 | 4.44 |
| | | | | | | | trimers | 10.35 |
| | | | | | | | | P0402 |
| | | | | | | | | ZM246 |
| New | 10.17DT | 10.17DT | 10.17DT | 10.17WT | 10.17WT | 10.17WT | 10.17WT | 5.41 |
| imm #2 | NP | NP | NP | 15.15 | 15.15 | 15.15 | 15.15 | 4.44 |
| | | | | 80.06 | 80.06 | 80.06 | 80.06 | 10.35 |
| | | | | 5.41 | 5.41 | 5.41 | 5.41 | P0402 |
| | | | | 4.44 | 4.44 | 4.44 | 4.44 | ZM246 |
| New | 10.17DT | 10.17DT | 10.17DT | 10.17WT | 15.15 | 80.06 | 5.41 | 5.41 |
| imm #3 | NP | NP | 10.17WT | 15.15 | 80.06 | 5.41 | 4.44 | 4.44 |
| | | | | | | 4.44 | P0402 | 10.35 |
| | | | | | | | | P0402 |
| | | | | | | | | ZM246 |

[0163] Antigenicity of a selection of these envelopes was tested against various antibodies and the results are shown in FIG. 17. From FIG. 17, the staged reactivity showed that certain DH270 antibodies acquired reactivity with selected envelopes at specific points of affinity maturation. For example, P0402 envelope did not bind to lowly mutated antibodies (Dh270 UCA, 15.6, or 13.6), but the antibody lineage acquired binding once it mutated to the DH270.1 stage of maturation. This differential binding is expected to facilitate selection of antibodies during the affinity maturation process. Administering these envelopes in sequence could select for affinity maturation of DH270-like antibodies into a bnAb.

[0164] These immunogens will be tested in mouse studies or any other suitable animal model.

[0165] Animal studies analyzing the immunogens from this example will be conducted to evaluate the immune responses induced by this selection of immunogen.

[0166] Any suitable adjuvant will be used. The number and time interval between boost can be determined experimentally.

[0167] The envelopes described in Table 3 or Table 4, expressed as recombinant proteins or modified mRNA formulated in LNP, are analyzed in animal studies including mouse and NHP animal models. The mouse animal model could be any model, including an animal model comprising a DH270UCA transgene.

### Example 2

[0168] This example describes animal studies with HIV-1 envelopes designed to prime and boost V3 glycan antibodies lineages. See FIGS. 9-15.

[0169] In FIGS. 9 and 10, the Mu563 and Mu565 studies compared the boosting effects of HV1301335 and HV1302164 preceded by the HV1302145 envelope or administered directly after HV1301925 prime. The regimen including HV1301335 was superior to the regimen with HV1302164 in eliciting heterologous neutralizing.

[0170] The heterologous neutralization of 92RW020 was enhanced by including the HV1302145 envelope as the second boost (compare Mu563-1 vs Mu565-1).

[0171] FIGS. 11A-11C show data for vaccine elicitation of serum neutralization in mouse studies Mu486-2 and Mu486-1. 11A shows DH270 UCA3 VH^{+/-}, VL^{+/-} mouse immunization regimen. Int this figure, Serum neutralization titer against autologous (11B) and heterologous (11C) viruses shown as serum dilution required to inhibit 50% of virus replication one week after the final immunization. N133D N138T matches the priming immunogen for both groups. N332T is a knockout mutation for the antibody of interest DH270. SVA is a negative control unrelated virus. Horizontal line represents group geometric mean. Each symbol represents an individual mouse. This study compared different boosting immunogens. Boosting with CH848.D949.10.17 (Mu486-2) elicited superior serum neutralization titers compared to boosting with a sequence of 5 different envelopes (Mu486-1). This study also investigated vaccine induction of critical mutations for antibody function. Amino acid sequence comparison between vaccine-induced antibodies and DH270 natural lineage antibodies. These antibodies were induced by vaccination and show that vaccination is inducing somatic mutation of DH270 antibodies. Mutations in the VH that are critical to select for are G57R and R98T. Both of these somatic mutations are selected by the vaccine regimen in group 2. In the VL of DH270, S27Y and L48Y are critical for neutralization activity. Both S27Y and L48Y were selected for in the vaccine-elicited antibodies. Prime-boost vaccination is eliciting antibodies with the critical somatic mutations needed for broad neutralization.

[0172] FIGS. 12A-12B show vaccine elicitation of serum neutralization in mouse study Mu534-1. DH270 UCA3 VH^{1+/-}, VL^{+/-} mouse immunization regimen is in FIG. 12A. FIG. 12B shows serum neutralization titer against autologous and heterologous viruses shown as serum dilution required to inhibit 50% of virus replication one week after the final immunization. N133D N138T matches the priming immunogen for both groups. N332T is a knockout mutation for the antibody of interest DH270. SVA is a negative control unrelated virus. Horizontal line represents group geometric mean. Each symbol represents an individual mouse. This study is a repeat of Mu486-2. This study showed that CH848.10.17 DT scNP followed by 10.17 trimer induction of heterologous neutralizing antibodies was reproducible. Induction of 92RW020 neutralization is a virus that is sensitive to affinity matured DH270 antibodies but not the UCA. Serum antibodies from the vaccinate mice neutralize 92RW020 indicating the DH270 antibodies have evolved.

[0173] FIG. 13 shows neutralization breadth elicited by prime-boost vaccine regimen. DH270 UCA3 VH^{+/-}, VL^{+/-} mouse immunization regimen as in FIG. 11—mouse studies Mu486-2 and Mu486-1. B. MAb neutralization titer IC50 as mcg per mL required to inhibit 50% of virus replication. Ab730526 was isolated from group 1. The remaining antibodies were isolated from group 2. NT, not tested. These antibodies were induced by vaccination. These vaccine-induced antibodies shown here exhibit broad neutralization. Their neutralization is superior to Dh270.I5.6 which is the first inferred node of the DH270.6 phylogeny. Each antibody has a second version with an additional mutation added (_X), which shows that the artificial addition of DH270 somatic mutations to the antibody further improves neutralization breadth. These artificially-mutated antibodies indicate the mutations that are needed to be selected by the next set of vaccine immunogens.

[0174] FIGS. 14A-D show Next generation sequencing of heavy chain variable regions shows vaccine selection of critical functional improbable mutations needed for DH270 antibody affinity maturation. In FIG. 14A, the table describes each DH270 UCA3 VH^{+/-}, VL^{+/-} mouse immunization regimen. FIGS. 14B-D, respectively, describe the frequency of the observed somatic mutation. Adjuvant only groups are shown as Adj only GLA-SE for protein immunization and Adj only LNP for mRNA. Group median is shown by horizontal bars. Mu546 and Mu547 studies delivered the envelopes as mRNAs. All other groups used proteins.

[0175] FIGS. 15A-C show Next generation sequencing of light chain variable regions shows vaccine selection of critical functional improbable mutations needed for DH270 antibody affinity maturation. In FIG. 15A, the table describes each DH270 UCA3 VH^{+/-}, VL^{+/-} mouse immunization regimen. FIGS. 15B,C, respectively, show the frequency of the observed somatic mutation. Adjuvant only groups are shown as Adj only GLA-SE for protein immunization and Adj only LNP for mRNA. Group median is shown by horizontal bars. Mu546 and Mu547 studies delivered the envelopes as mRNAs. All other groups used proteins. Mouse studies 563 and 565 included the D358.80.06 DS.ch.SOSIP and D526.25.05 DS.ch.SOSIP as boosting immunogens. Based on the frequency of somatic mutations observed in DH270 sequences, D358.80.06 DS.ch.SOSIP and D526.25.05 DS.ch.SOSIP did not select for higher frequencies of VH (G57R, R98T) mutations or VL (L48Y, S27Y) mutations than immunizing with CH848.D949.10.17N133D/N138T alone (Mu408 or Mu445 group 5). mRNA immunization selected for higher frequencies of VL (L48Y, S27Y) mutations than protein immunization with the same envelope.

[0176] Non-limiting embodiments of envelopes used in mouse studies in Example 2 are shown in FIG. 20.

The application's sequence listing, which the Patent Office published only in electronic form, follows.

SEQUENCE LISTING (185 sequences)

SEQ ID NO: 1 - protein, 4 aa, Artificial Sequence
  Description of Artificial Sequence: Synthetic peptide
GDIR

SEQ ID NO: 2 - protein, 4 aa, Artificial Sequence
  Description of Artificial Sequence: Synthetic peptide
GDIK

SEQ ID NO: 3 - protein, 4 aa, Artificial Sequence
  Description of Artificial Sequence: Synthetic peptide
VDTA

SEQ ID NO: 4 - protein, 4 aa, Unknown
  Description of Unknown: Furin cleavage site sequence
REKR

SEQ ID NO: 5 - protein, 9 aa, Unknown
  Description of Unknown: Furin cleavage site sequence
RRVVEREKR

SEQ ID NO: 6 - protein, 9 aa, Artificial Sequence
  Description of Artificial Sequence: Synthetic peptide
ERVVEREKE

SEQ ID NO: 7 - protein, 4 aa, Artificial Sequence
  Description of Artificial Sequence: Synthetic peptide
SEKS

SEQ ID NO: 8 - protein, 79 aa, Artificial Sequence
  Description of Artificial Sequence: Synthetic polypeptide
MRVMGIQRNYPQWWIWSMLGFWMLMICNGMWVTVYYGVPVWKEAKTTLFCASDAKAYEKEVHNVWATHACVPTDPNPQE

SEQ ID NO: 9 - protein, 24 aa, Artificial Sequence
  Description of Artificial Sequence: Synthetic peptide
MPMGSLQPLATLYLLGMLVASVLA

SEQ ID NO: 10 - protein, 5 aa, Artificial Sequence
  Description of Artificial Sequence: Synthetic peptide
  MOD_RES (3)..(3): Any amino acid
LPXTG

SEQ ID NO: 11 - DNA, 1947 bp, Artificial Sequence
  Description of Artificial Sequence: Synthetic polynucleotide
atgggatctctgcaacctctggccacactgtacctgctgggaatgctggtggcttctgtgctggccgccgagaatctgtgggtcacagtgtactatggcgtgcccgtgtggaaagaggccaagaccacactgttctgtgccagcgacgccaaggcctacaagaaagaggtgcacaacgtctgggccacacacgcctgtgtgcctaccgatccatctcctcaagagctgttcctggaaaacgtgaccgagaacttcaacatgtggaagaacgacatggtggaccagatgcacgaggacatcatcagcctgtgggaccagagcctgaagccttgcgtgaagctgacccctctgtgcgtgaccctgatctgtagcaccgccaccgtgaacaacagagccgtggacgagatgaagaactgcagcttcaacaccaccaccgagatccgggacaagaagaagaaagagtacgccctgttctatcggagcgacgtggtgcccctggacgagacaaacaacaccagcgagtaccggctgatcaactgcaacacctccgcctgcactcaggcctgtcctaaagtgaccttcgagcccattcctatccactactgtgcccctgccggctacgccatcctgaagtgcaacaacgagacattcaacggcacaggcccctgcagcaatgtgtccaccgtgcagtgtacccacggcatcagaccagtggtgtctacccagctgctgctgaatggaagcctggccgagaaagaaatcgtgatcagaagcgagaacctgaccaacaacgccaagatcatcattgtgcatctgaacacctctgtggaaatcgtgtgcacccggcctaacaacaacacccggaagtctgtgcggatcggccctggccagacattctatgccaccggcgatatcatcggcgacatcaagcaggcccactgcaacatcagcgaggaaaagtggaacgagacactgcagaaagtgggcatcgagctgcagaagcacttccccaacaagaccatcaagtacaaccagagcgctggcggcgacatggaaatcaccacacacagcttcaattgtggcggcgagttcttctactgcaataccagcaagctgttcaacagcacctacaacggcacctatatcagcaccaactccaccaatagcaccagctacatcaccctgcagtgccggatcaagcagatcatcaatatgtggcaaggcgtcggccggtgtatgtacgcccctcctatcgccggcaacatcacctgtcggagcaatatcacaggcctgctgctcaccagagatggcggcatcaacaacgtgtccaacgagacagaaaccttccggcctgccggcggagacatgagagacaattggagaagcgagctgtacaagtacaaggtggtcaagatcgagcccctgggcgtcgcaccaacacggtgcaagagaagagtcgtgggccgtcgtagaaggcggagagccgttggaattggcgccgtgttcctgggctttctgggagccgctggatctacaatgggcgctgccagcatgaccctgacagtgcaggctagaaatctgctgagcggcatcgtgcagcagcagagcaatctgctcagagcccctgaggctcagcagcacctcctgaaactgacagtgtggggaatcaagcagctgcaggccagagtgctggcagtggaaagatacctgagggaccagcagctcctcggaatctggggatgtagcggcaagctgatctgctgcaccaacgtgccctggaactccagctggtccaaccggaatctgagcgagatctgggataacatgacctggctgcagtgggacaaagagatcagcaactacacccagatcatctacggcctgctggaagagagccagaaccagcaagagaaaaacgagcaggacctgctggccctggactgataa

SEQ ID NO: 12 - DNA, 1932 bp, Artificial Sequence
  Description of Artificial Sequence: Synthetic polynucleotide
atgggatctctgcagcctctggccacactgtacctgctgggaatgctggtggcctcttgtctgggcgttgagaagctgtgggtcaccgtgtactatggcgtgcccgtgtggaaagaagcctgcaccacactgttctgtgccagcgacgccaaggcctacgataccaaggtgcgcaatgtgtgggccactcactgctgcgtgcccaccgatcctaatcctcaagaggtggtgctggaaaacgtgaccgagcacttcaacatgtggaagaacaacatggtcgagcagatgcaagaggacatcatcagcctgtgggaccagagcctgaagccttgcgtgaagctgacccctctgtgcgtgaccctgaactgtagcaccgccaccgtgaacaacagagccgtggacgagatgaagaactgcagcttcaacatcaccacctccatcagagacaaggtgcagaaagagtacgccctgttctacaagctggacgtggtgcccatcgacaacaacaacaccagctacagactgatcagctgcgacaccagcgtgatcacccaggcctgtcctaagatcagcttcgagcccattcctatccactactgtgcccctgccggcttcgccatcctgaagtgcaacgacaagaccttcaacggcaagggcccctgcaagaacgtgtccaccgtgcagtgtacccacggcatcagaccagtggtgtctacccagctgctgctgaatggctctctggccgaggaagaagtggtcatcagaagcgacaacttcaccaacaacgccaagaccatcatcgtgcagctgaaagagagcgtcgagatcaactgcacccggcctaacaacaatacccggaagtccatccacatcggccctggcagatggttttacaccaccggcgagattatcggcgacatcagacaggcccactgcaacatcagccgggccaagtggaacgacaccctgaagcagatcgtgatcaagctgagagagcagttcgagaacaagacgatcgtgttcaaccacagctctggcggcgaccccgagattgtgatgcactcctttaactgtggcggcgagttcttctactgcaacagcacccagctgttcaactccacctggaacaacaacacagagggcagcaacaataccgagggcaacaccatcacactgccctgccggatcaagcagatcatcaatatgtggcaagagatcggcaaggctatgtacgcccctcctatccggggccagatcagatgcagcagcaatatcacaggcctgctgctcaccagagatggcggcatcaacgagaacggcaccgagatcttcagacccggcggaggcgacatgcgggacaattggagaagcgagctgtacaagtacaaggtggtcaagatcgagcccctgggcgtcgcccctaccaagtgcaagagaagagtcgtgggccgtagaaggcggcggagagctgttggaattggcgccgtgttcctgggctttctgggagccgctggatctacaatgggcgctgccagcatgaccctgacagtgcaggctagacagctgctgtccggcattgtccagcagcagaacaactgcctgagagcccctgagtgtcaacaaagaatgctgcagctgaccgtgtggggcatcaaacagctgcaggccagagttctggccgtggaaagatacctgggcgaccagcagctcctcggcatctggggatgttctggcaagctgatttgctgcaccgccgtgccttggaatgccagctggtctaacaagagcctggaccggatctggaacaatatgacctggatggaatgggagcgcgagatcgacaactacacctccgagatctacaccctgatcgaggaaagccagaaccagcaagagaaaaacgagcaagagctgctcgagctggattaatga

SEQ ID NO: 13 - DNA, 1944 bp, Artificial Sequence
  Description of Artificial Sequence: Synthetic polynucleotide
atgggctcgctccagccgctcgcgacgctgtacctcctgggcatgctcgtggcgtccgtgctggcggccgagaacctgtgggtgacggtgtactacggcgtgcccgtgtggaaggaggccaacaccacgctgttctgcgccagcgacgccaaggcctacgacaccgaggtgcacaacgtgtgggcgacccacgcctgcgtgccgacggaccccaacccccaggagatcgtgctggagaacgtgaccgagaacttcaacatgtggaagaacaacatggtggagcagatgcacgaggacatcatctcgctgtgggaccagtccctgaagccgtgcgtgaagctgacgcccctgtgcgtgaccctgaactgtagcaccgccaccgtgaacaacagagccgtggacgagatgaagaactgctccttcaacatcaccaccgagatccgcgacaagaagcagaaggtgtacgcgctgttctaccggctggacgtggtgccgatcgacgacaacaacaacaactccagcaactaccgcctgatcaactgcaacaccagcgcctgcacccaggcctgcccgaaggtgtccttcgagcccatccccatccactactgcgcgccggccggcttcgccatcctgaagtgcaacgacaagaagttcaacggcaccggcccctgcaagaacgtgtccaccgtgcagtgcacccacgggatcaagcccgtggtgtccacgcagctgctgctgaacggctccctggccgaggaggagatcatcatccgctccgagaacatcacgaacaacgccaagaccatcatcgtgcagctgaacgagtccgtggagatcaactgcaccaggcccaacaacaacacccgcaagtccatccggatcggccctggccaggcgttctacgccaccggcgacatcatcggcgacatccgccaggcgcactgcaacatctcgggcacgaagtggaacaagaccctgcagcaggtggcgaagaagctgcgcgagcacttcaacaacaagaccatcatcttcaagcccagctccggcggcgacctggagatcacgacccactccttcaactgccgcggcgagttcttctactgcaacacctccggcctgttcaactcgacgtggatcgggaacggcacgaagaacaacaacaacaccaacgacaccatcaccctgccctgccgcatcaagcagatcatcaacatgtggcagggcgtgggccagtgcatgtacgcgccgcccatcgagggcaagatcacctgcaagtccaacatcaccggcctgctcctgacgcgcgacggcggcaacaacaacaccaacgagaccgagatcttcaggccgggcggcggcgacatgcgcgacaactggcgctcggagctgtacaagtacaaggtggtgaagatcgagcccctgggcgtggcgccgacgcgctgcaagagacgcgtggtgggccgcagacgaaggagacgggccgtgggcatcggcgcggtgttcctgggcttcctgggagcagctggttcgacgatgggcgcagcttccatgaccctgacagtgcaggcacgcaacctgctctccggcatcgtccagcagcagtcgaacctgcttcgagcccccgaggcgcagcagcacctcctcaagctgaccgtgtggggcatcaagcagctgcaggcacgcgtgctagccgtggagcgctacctccgcgaccagcagctgctcggaatctggggctgctcgggcaagctgatctgctgcaccaacgtgccgtggaacagctcctggtccaaccgcaacctctcggagatctgggacaacatgacctggctccagtgggacaaggagatctcgaactacacccagatcatctacggcctgctggaggagtcccagaaccagcaggagaagaacgagcaggacctgctggccctggactgataa

SEQ ID NO: 14 - DNA, 1947 bp, Artificial Sequence
  Description of Artificial Sequence: Synthetic polynucleotide
atgggatctctgcaacctctggccacactgtacctgctgggaatgctggtggcttctgtgctggccgccgagaatctgtgggtcacagtgtactatggcgtgcccgtgtggaaagaggccaagaccacactgttctgtgccagcgacgccaaggcctacaagaaagaggtgcacaacgtctgggccacacacgcctgtgtgcctaccgatccatctcctcaagagctgttcctggaaaacgtgaccgagaacttcaacatgtggaagaacgacatggtggaccagatgcacgaggacatcatcagcctgtgggaccagagcctgaagccttgcgtgaagctgacccctctgtgcgtgaccctgatctgtagcaccgccaccgtgaacaacagagccgtggacgagatgaagaactgcagcttcaacaccaccaccgagatccgggacaagaagaagaaagagtacgccctgttctatcggagcgacgtggtgcccctggacgagacaaacaacaccagcgagtaccggctgatcaactgcaacacctccgcctgcactcaggcctgtcctaaagtgaccttcgagcccattcctatccactactgtgcccctgccggctacgccatcctgaagtgcaacgacgagacattcaacggcacaggcccctgcagcaatgtgtccaccgtgcagtgtacccacggcatcagaccagtggtgtctacccagctgctgctgaatggaagcctggccgagaaagaaatcgtgatcagaagcgagaacctgaccaacaacgccaagatcatcattgtgcatctgcacacccctgtggaaatcgtgtgcacccggcctaacaacaacacccggaagtctgtgcggatcggccctggccagacattctatgccaccggcgatatcatcggcgacatcaagcaggcccactgcaacatcagcgaggaaaagtggaacgagacactgcagaaagtgggcatcgagctgcagaagcacttccccaacaagaccatcaagtacaaccagagcgctggcggcgacatggaaatcaccacacacagcttcaattgtggcggcgagttcttctactgcaataccagcaagctgttcaacagcacctacaacggcacctatatcagcaccaactccaccaatagcaccagctacatcaccctgcagtgccggatcaagcagatcatcaatatgtggcaaggcgtcggccggtgtatgtacgcccctcctatcgccggcaacatcacctgtcggagcaatatcacaggcctgctgctcaccagagatggcggcatcaacaacgtgtccaacgagacagaaaccttccggcctgccggcggagacatgagagacaattggagaagcgagctgtacaagtacaaggtggtcaagatcgagcccctgggcgtcgcaccaacacggtgcaagagaagagtcgtgggccgtcgtagaaggcggagagccgttggaattggcgccgtgttcctgggctttctgggagccgctggatctacaatgggcgctgccagcatgaccctgacagtgcaggctagaaatctgctgagcggcatcgtgcagcagcagagcaatctgctcagagcccctgaggctcagcagcacctcctgaaactgacagtgtggggaatcaagcagctgcaggccagagtgctggcagtggaaagatacctgagggaccagcagctcctcggaatctggggatgtagcggcaagctgatctgctgcaccaacgtgccctggaactccagctggtccaaccggaatctgagcgagatctgggataacatgacctggctgcagtgggacaaagagatcagcaactacacccagatcatctacggcctgctggaagagagccagaaccagcaagagaaaaacgagcaggacctgctggccctggactgataa

SEQ ID NO: 15 - DNA, 2559 bp, Artificial Sequence
  Description of Artificial Sequence: Synthetic polynucleotide
atgagagtgacggggatactgaggaattatccacaatggtggatatggggcatcttaggcttttggatgctaatgacttgtaatggggaaggaaacttgtgggtcacagtctactatggggtaccagtatggaaagaagcaaaaactactctgttttgtgcatcagatgccaaagcgtataagaaagaagtgcataatgtctgggcgacacatgcctgtgtacccacagaccccagcccacaagaactgtttttggaaaatgtaacagaaaattttaacatgtggaaaaatgatatggtagatcagatgcatgaggatataatcagtctatgggatcaaagcctaaagccatgtgtaaagttgaccccactctgtgtcactttaatttgtagtactgctactgttaacaatagagcagttgatgaaatgaaaaattgctccttcaatacaaccacagaaataagagataagaaaaagaaggaatatgcacttttttatagatctgatgtagtaccacttgatgaaacaaacaataccagtgagtatagattaataaattgtaatacctcagccgtaacacaagcctgtccaaaggtcacttttgaaccaattcctatacattattgtgctccagctggttatgcgattctaaagtgcaatgatgagacattcaatggaacaggaccatgcagtaatgtcagcacagtacaatgtacacatggaattaggccagtggtatcaacccaactactgttaaatggtagtctggcagaaaaagagatagtaattagatctgaaaacctgacaaacaatgccaaaataataatagtccatcttcacacccctgtagaaattgtgtgtacaaggcccggccataatacaaggaaaagtgtgagaataggcccaggacaaacattctatgcaacaggagacataataggagatataagacaagcacattgtaacattaatgaaagtaaatggaatgaaactttacaaaaggtaggtatagaattgcaaaaacacttccctaataagacaataaagtataaccaatccgcaggaggagacatggaaattacaacacatagctttaattgtggaggagaatttttctattgcaatacatcaaagctgtttaatagtacatacaatggtacatacataagtacaaacagcacaaacagtacttcatacatcacgcttcaatgcagaataaaacaaattataaacatgtggcagggggtaggaagagcaatgtatgctcctcccattgcaggaaacataacatgtagatcaaatatcacagggctactattgacacgtgatggagggatcaataatgttagcaacgagacagagacattcaggcctgcaggaggagatatgagggataattggagaagtgaattatataaatataaagtagtagaagttcagccattaggaatagcaccaactggtgcaaaaaggagagtggtggagagagaaaaaagagcagcaggactaggagctttgttccttgggttcttgggagcagcaggaagcactatgggcgcagcatcaataacgctgacggtacaggccagacaattgttgtctggtatagtgcaacagcaaagcaatttgctgagggctatagaggcgcaacagcatatgttgcaactcacggtctggggcatcaagcagctccaggcaagagtcctggctctggaaagatacctaaaggatcaacagctcctagggatgtggggctgctctggaaaactcatctgcaccactaatgtgccttggaacactagttggagtaataaatctgaaatggatatttggaataacatgacatggatgcagtgggaaagagaaattagcaattacacagagacaatatacatgttgcttgaagactcgcaacgccagcaggagagaaatgaaaaagatttactagcattggacagttggaacagtctgtggaattggtttaacataacaaactggctgtggtatataaaaatattcataatgatagtagggggcttgataggtttaagaatagtttttgctgtgctatctatagtgaatagagtcaggcagggatactcacctttgtcgttgcagacccttaccccaaacccgagggaacccgacaggctcagaggaatcgaagaagaaggtggagagcaagacagagacagatccattcgattagtgagcggattcttgccaattgtctgggacgacctgcggagcctgtgcctcttcagttaccaccgattgagagactttctattgctggcagcgagagtggtggaacttctgggacacagcagtctcaggggactgcagagggggtgggaagtccttaagtatctgggaagtcttgtgcagtattggggtctggaactaaaaaggagtgctattagtctttttgataccctagcaatagcagtagctgaaggaacagataggattatagaattaatacaaggattttgtagagctatccgcaacatacctacaagaataagacaaggctttgaagcatctttgctataataa

SEQ ID NO: 16 - DNA, 1947 bp, Artificial Sequence
  Description of Artificial Sequence: Synthetic polynucleotide
atgggatctctgcagcctctggccacactgtacctgctgggaatgctggtggcttctgtgctggccgccgagaatctgtgggtcacagtgtactatggcgtgcccgtgtggaaagaggccaagaccacactgttctgtgccagcgacgccaaggcctacaagaaagaggtgcacaacgtctgggccacacacgcctgtgtgcctaccgatccatctcctcaagagctgttcctggaaaacgtgaccgagaacttcaacatgtggaagaacgacatggtggaccagatgcacgaggacatcatcagcctgtgggaccagagcctgaagccttgcgtgaagctgacccctctgtgcgtgaccctgatctgtagcaccgccaccgtgaacaacagagccgtggacgagatgaagaactgcagcttcaacaccaccaccgagatccgggacaagaagaagaaagagtacgccctgttctatcggagcgacgtggtgcccctggacgagacaaacaacaccagcgagtaccggctgatcaactgcaacacctccgcctgcacacaggcttgccccaaagtgaccttcgagcccattcctatccactactgtgcccctgccggctacgccatcctgaagtgcaacgacgagacattcaacggcacaggcccctgcagcaatgtgtccaccgtgcagtgtacccacggcatcagaccagtggtgtctacccagctgctgctgaatggaagcctggccgagaaagaaatcgtgatcagaagcgagaacctgaccaacaacgccaagatcatcattgtgcatctgcacacccctgtggaaatcgtgtgcaccagacctggccacaacacccggaagtctgtgcggattggacccggccagaccttttatgccaccggcgatatcatcggcgacatcagacaggcccactgtaacatcaacgagagcaagtggaacgagacactgcagaaagtgggcatcgagctgcagaagcacttccccaacaagaccatcaagtacaaccagagcgctggcggcgacatggaaatcaccacacacagcttcaattgtggcggcgagttcttctactgcaataccagcaagctgttcaacagcacctacaacggcacctatatcagcaccaactccaccaatagcaccagctacatcaccctgcagtgccggatcaagcagatcatcaatatgtggcaaggcgtgggcagatgcatgtacgcccctcctatcgccggcaacatcacctgtcggagcaatatcacaggcctgctgctcaccagagatggcggcatcaacaacgtgtccaacgagacagaaaccttccggcctgccggcggagacatgagagacaattggagaagcgagctgtacaagtacaaggtggtcaagatcgagcccctgggcgtcgcaccaacacggtgcaagagaagagtcgtgggacgtagacgaaggcggagagccgttggaatcggagccgtgttcctgggctttctgggagccgctggatctacaatgggcgctgccagcatgaccctgacagtgcaggctagaaatctgctgagcggcatcgtgcagcagcagagcaatctgctcagagcccctgaggctcagcagcacctcctgaaactgacagtgtggggcatcaagcagctgcaggcaagagtgctggcagtggaaagatacctgcgggaccagcagctcctcggaatctggggatgtagcggcaagctgatctgctgcaccaacgtgccctggaactccagctggtccaaccggaatctgagcgagatctgggataacatgacctggctgcagtgggacaaagagatcagcaactacacccagatcatctacggcctgctggaagagagccagaaccagcaagagaaaaacgagcaggacctgctggccctggactgataa

SEQ ID NO: 17 - DNA, 1947 bp, Artificial Sequence
  Description of Artificial Sequence: Synthetic polynucleotide
atgggatctctgcagcctctggccacactgtacctgctgggaatgctggtggcttctgtgctggccgccgagaatctgtgggtcacagtgtactatggcgtgcccgtgtggaaagaggcctgtaccacactgttctgtgccagcgacgccaaggcctacaagaaaaaggtgcgcaacgtctgggccacacactgctgtgtgcctaccgatccatctcctcaagagctgttcctggaaaacgtgaccgagaacttcaacatgtggaagaacgacatggtggaccagatgcacgaggacatcatcagcctgtgggaccagagcctgaagccttgcgtgaagctgacccctctgtgcgtgaccctgatctgtagcaccgccaccgtgaacaacagagccgtggacgagatgaagaactgcagcttcaacaccaccaccgagatccgggacaagaagaagaaagagtacgccctgttctatcggagcgacgtggtgcccctggacgagacaaacaacaccagcgagtaccggctgatcaactgcaacacctccgccgtgacacaggcttgccccaaagtgaccttcgagcccattcctatccactactgtgcccctgccggctacgccatcctgaagtgcaacgacgagacattcaacggcacaggcccctgcagcaatgtgtccaccgtgcagtgtacccacggcatcagaccagtggtgtctacccagctgctgctgaatggaagcctggccgagaaagaaatcgtgatcagaagcgagaacctgaccaacaacgccaagatcatcattgtgcatctgcacacccctgtggaaatcgtgtgcaccagacctggccacaacacccggaagtctgtgcggattggacccggccagtggttttatgccaccggcgatatcatcggcgacatcagacaggcccactgtaacatcaacgagagcaagtggaacgagacactgcagaaagtgggcatcgagctgcagaagcacttccccaacaagaccatcaagtacaaccagagcgctggcggcgacatggaaatcaccacacacagcttcaattgtggcggcgagttcttctactgcaataccagcaagctgttcaacagcacctacaacggcacctatatcagcaccaactccaccaatagcaccagctacatcaccctgcagtgccggatcaagcagatcatcaatatgtggcaaggcgtgggcagagctatgtacgcccctcctatcgccggcaacatcacctgtcggagcaatatcacaggcctgctgctcaccagagatggcggcatcaacaacgtgtccaacgagacagaaaccttccggcctgccggcggagacatgagagacaattggagaagcgagctgtacaagtacaaggtggtcaagatcgagcccctgggcgtcgcaccaacacggtgcaagagaagagtcgtgggacgtagacgaaggcggagagccgttggaatcggagccgtgttcctgggctttctgggagccgctggatctacaatgggcgctgccagcatgaccctgacagtgcaggctagaaatctgctgagcggcatcgtgcagcagcagagcaattgcctcagagcccctgagtgtcagcagcacctcctgaaactgacagtgtggggcatcaagcagctgcaggcaagagtgctggcagtggaaagatacctgcgggaccagcagctcctcggaatctggggatgtagcggcaagctgatctgctgcaccaacgtgccctggaactccagctggtccaaccggaatctgagcgagatctgggataacatgacctggctgcagtgggacaaagagatcagcaactacacccagatcatctacggcctgctggaagagagccagaaccagcaagagaaaaacgagcaggacctgctggccctggactgataa

SEQ ID NO: 18 - protein, 647 aa, Artificial Sequence
  Description of Artificial Sequence: Synthetic polypeptide
MGSLQPLATLYLLGMLVASVLAAENLWVTVYYGVPVWKEAKTTLFCASDAKAYKKEVHNVWATHACVPTDPSPQELFLENVTENFNMWKNDMVDQMHEDIISLWDQSLKPCVKLTPLCVTLICSTATVNNRAVDEMKNCSFNTTTEIRDKKKKEYALFYRSDVVPLDETNNTSEYRLINCNTSACTQACPKVTFEPIPIHYCAPAGYAILKCNNETFNGTGPCSNVSTVQCTHGIRPVVSTQLLLNGSLAEKEIVIRSENLTNNAKIIIVHLNTSVEIVCTRPNNNTRKSVRIGPGQTFYATGDIIGDIKQAHCNISEEKWNETLQKVGIELQKHFPNKTIKYNQSAGGDMEITTHSFNCGGEFFYCNTSKLFNSTYNGTYISTNSTNSTSYITLQCRIKQIINMWQGVGRCMYAPPIAGNITCRSNITGLLLTRDGGINNVSNETETFRPAGGDMRDNWRSELYKYKVVKIEPLGVAPTRCKRRVVGRRRRRRAVGIGAVFLGFLGAAGSTMGAASMTLTVQARNLLSGIVQQQSNLLRAPEAQQHLLKLTVWGIKQLQARVLAVERYLRDQQLLGIWGCSGKLICCTNVPWNSSWSNRNLSEIWDNMTWLQWDKEISNYTQIIYGLLEESQNQQEKNEQDLLALD

SEQ ID NO: 19 - protein, 642 aa, Artificial Sequence
  Description of Artificial Sequence: Synthetic polypeptide
MGSLQPLATLYLLGMLVASCLGVEKLWVTVYYGVPVWKEACTTLFCASDAKAYDTKVRNVWATHCCVPTDPNPQEVVLENVTEHFNMWKNNMVEQMQEDIISLWDQSLKPCVKLTPLCVTLNCSTATVNNRAVDEMKNCSFNITTSIRDKVQKEYALFYKLDVVPIDNNNTSYRLISCDTSVITQACPKISFEPIPIHYCAPAGFAILKCNDKTFNGKGPCKNVSTVQCTHGIRPVVSTQLLLNGSLAEEEVVIRSDNFTNNAKTIIVQLKESVEINCTRPNNNTRKSIHIGPGRWFYTTGEIIGDIRQAHCNISRAKWNDTLKQIVIKLREQFENKTIVFNHSSGGDPEIVMHSFNCGGEFFYCNSTQLFNSTWNNNTEGSNNTEGNTITLPCRIKQIINMWQEIGKAMYAPPIRGQIRCSSNITGLLLTRDGGINENGTEIFRPGGGDMRDNWRSELYKYKVVKIEPLGVAPTKCKRRVVGRRRRRRAVGIGAVFLGFLGAAGSTMGAASMTLTVQARQLLSGIVQQQNNCLRAPECQQRMLQLTVWGIKQLQARVLAVERYLGDQQLLGIWGCSGKLICCTAVPWNASWSNKSLDRIWNNMTWMEWEREIDNYTSEIYTLIEESQNQQEKNEQELLELD

SEQ ID NO: 20 - protein, 646 aa, Artificial Sequence
  Description of Artificial Sequence: Synthetic polypeptide
MGSLQPLATLYLLGMLVASVLAAENLWVTVYYGVPVWKEANTTLFCASDAKAYDTEVHNVWATHACVPTDPNPQEIVLENVTENFNMWKNNMVEQMHEDIISLWDQSLKPCVKLTPLCVTLNCSTATVNNRAVDEMKNCSFNITTEIRDKKQKVYALFYRLDVVPIDDNNNNSSNYRLINCNTSACTQACPKVSFEPIPIHYCAPAGFAILKCNDKKFNGTGPCKNVSTVQCTHGIKPVVSTQLLLNGSLAEEEIIIRSENITNNAKTIIVQLNESVEINCTRPNNNTRKSIRIGPGQAFYATGDIIGDIRQAHCNISGTKWNKTLQQVAKKLREHFNNKTIIFKPSSGGDLEITTHSFNCRGEFFYCNTSGLFNSTWIGNGTKNNNNTNDTITLPCRIKQIINMWQGVGQCMYAPPIEGKITCKSNITGLLLTRDGGNNNTNETEIFRPGGGDMRDNWRSELYKYKVVKIEPLGVAPTRCKRRVVGRRRRRRAVGIGAVFLGFLGAAGSTMGAASMTLTVQARNLLSGIVQQQSNLLRAPEAQQHLLKLTVWGIKQLQARVLAVERYLRDQQLLGIWGCSGKLICCTNVPWNSSWSNRNLSEIWDNMTWLQWDKEISNYTQIIYGLLEESQNQQEKNEQDLLALD

SEQ ID NO: 21 - protein, 647 aa, Artificial Sequence
  Description of Artificial Sequence: Synthetic polypeptide
MGSLQPLATLYLLGMLVASVLAAENLWVTVYYGVPVWKEAKTTLFCASDAKAYKKEVHNVWATHACVPTDPSPQELFLENVTENFNMWKNDMVDQMHEDIISLWDQSLKPCVKLTPLCVTLICSTATVNNRAVDEMKNCSFNTTTEIRDKKKKEYALFYRSDVVPLDETNNTSEYRLINCNTSACTQACPKVTFEPIPIHYCAPAGYAILKCNDETFNGTGPCSNVSTVQCTHGIRPVVSTQLLLNGSLAEKEIVIRSENLTNNAKIIIVHLHTPVEIVCTRPNNNTRKSVRIGPGQTFYATGDIIGDIKQAHCNISEEKWNETLQKVGIELQKHFPNKTIKYNQSAGGDMEITTHSFNCGGEFFYCNTSKLFNSTYNGTYISTNSTNSTSYITLQCRIKQIINMWQGVGRCMYAPPIAGNITCRSNITGLLLTRDGGINNVSNETETFRPAGGDMRDNWRSELYKYKVVKIEPLGVAPTRCKRRVVGRRRRRRAVGIGAVFLGFLGAAGSTMGAASMTLTVQARNLLSGIVQQQSNLLRAPEAQQHLLKLTVWGIKQLQARVLAVERYLRDQQLLGIWGCSGKLICCTNVPWNSSWSNRNLSEIWDNMTWLQWDKEISNYTQIIYGLLEESQNQQEKNEQDLLALD

SEQ ID NO: 22 - protein, 851 aa, Artificial Sequence
  Description of Artificial Sequence: Synthetic polypeptide
MRVTGILRNYPQWWIWGILGFWMLMTCNGEGNLWVTVYYGVPVWKEAKTTLFCASDAKAYKKEVHNVWATHACVPTDPSPQELFLENVTENFNMWKNDMVDQMHEDIISLWDQSLKPCVKLTPLCVTLICSTATVNNRAVDEMKNCSFNTTTEIRDKKKKEYALFYRSDVVPLDETNNTSEYRLINCNTSAVTQACPKVTFEPIPIHYCAPAGYAILKCNDETFNGTGPCSNVSTVQCTHGIRPVVSTQLLLNGSLAEKEIVIRSENLTNNAKIIIVHLHTPVEIVCTRPGHNTRKSVRIGPGQTFYATGDIIGDIRQAHCNINESKWNETLQKVGIELQKHFPNKTIKYNQSAGGDMEITTHSFNCGGEFFYCNTSKLFNSTYNGTYISTNSTNSTSYITLQCRIKQIINMWQGVGRAMYAPPIAGNITCRSNITGLLLTRDGGINNVSNETETFRPAGGDMRDNWRSELYKYKVVEVQPLGIAPTGAKRRVVEREKRAAGLGALFLGFLGAAGSTMGAASITLTVQARQLLSGIVQQQSNLLRAIEAQQHMLQLTVWGIKQLQARVLALERYLKDQQLLGMWGCSGKLICTTNVPWNTSWSNKSEMDIWNNMTWMQWEREISNYTETIYMLLEDSQRQQERNEKDLLALDSWNSLWNWFNITNWLWYIKIFIMIVGGLIGLRIVFAVLSIVNRVRQGYSPLSLQTLTPNPREPDRLRGIEEEGGEQDRDRSIRLVSGFLPIVWDDLRSLCLFSYHRLRDFLLLAARVVELLGHSSLRGLQRGWEVLKYLGSLVQYWGLELKRSAISLFDTLAIAVAEGTDRIIELIQGFCRAIRNIPTRIRQGFEASLL

SEQ ID NO: 23 - protein, 647 aa, Artificial Sequence
  Description of Artificial Sequence: Synthetic polypeptide
MGSLQPLATLYLLGMLVASVLAAENLWVTVYYGVPVWKEAKTTLFCASDAKAYKKEVHNVWATHACVPTDPSPQELFLENVTENFNMWKNDMVDQMHEDIISLWDQSLKPCVKLTPLCVTLICSTATVNNRAVDEMKNCSFNTTTEIRDKKKKEYALFYRSDVVPLDETNNTSEYRLINCNTSACTQACPKVTFEPIPIHYCAPAGYAILKCNDETFNGTGPCSNVSTVQCTHGIRPVVSTQLLLNGSLAEKEIVIRSENLTNNAKIIIVHLHTPVEIVCTRPGHNTRKSVRIGPGQTFYATGDIIGDIRQAHCNINESKWNETLQKVGIELQKHFPNKTIKYNQSAGGDMEITTHSFNCGGEFFYCNTSKLFNSTYNGTYISTNSTNSTSYITLQCRIKQIINMWQGVGRCMYAPPIAGNITCRSNITGLLLTRDGGINNVSNETETFRPAGGDMRDNWRSELYKYKVVKIEPLGVAPTRCKRRVVGRRRRRRAVGIGAVFLGFLGAAGSTMGAASMTLTVQARNLLSGIVQQQSNLLRAPEAQQHLLKLTVWGIKQLQARVLAVERYLRDQQLLGIWGCSGKLICCTNVPWNSSWSNRNLSEIWDNMTWLQWDKEISNYTQIIYGLLEESQNQQEKNEQDLLALD

SEQ ID NO: 24 - protein, 647 aa, Artificial Sequence
  Description of Artificial Sequence: Synthetic polypeptide
MGSLQPLATLYLLGMLVASVLAAENLWVTVYYGVPVWKEACTTLFCASDAKAYKKKVRNVWATHCCVPTDPSPQELFLENVTENFNMWKNDMVDQMHEDIISLWDQSLKPCVKLTPLCVTLICSTATVNNRAVDEMKNCSFNTTTEIRDKKKKEYALFYRSDVVPLDETNNTSEYRLINCNTSAVTQACPKVTFEPIPIHYCAPAGYAILKCNDETFNGTGPCSNVSTVQCTHGIRPVVSTQLLLNGSLAEKEIVIRSENLTNNAKIIIVHLHTPVEIVCTRPGHNTRKSVRIGPGQWFYATGDIIGDIRQAHCNINESKWNETLQKVGIELQKHFPNKTIKYNQSAGGDMEITTHSFNCGGEFFYCNTSKLFNSTYNGTYISTNSTNSTSYITLQCRIKQIINMWQGVGRAMYAPPIAGNITCRSNITGLLLTRDGGINNVSNETETFRPAGGDMRDNWRSELYKYKVVKIEPLGVAPTRCKRRVVGRRRRRRAVGIGAVFLGFLGAAGSTMGAASMTLTVQARNLLSGIVQQQSNCLRAPECQQHLLKLTVWGIKQLQARVLAVERYLRDQQLLGIWGCSGKLICCTNVPWNSSWSNRNLSEIWDNMTWLQWDKEISNYTQIIYGLLEESQNQQEKNEQDLLALD

SEQ ID NO: 25 - protein, 6 aa, Artificial Sequence
  Description of Artificial Sequence: Synthetic peptide
LPSTGG

SEQ ID NO: 26 - protein, 5 aa, Artificial Sequence
  Description of Artificial Sequence: Synthetic peptide
LPSTG

SEQ ID NO: 27 - protein, 655 aa, Artificial Sequence
  Description of Artificial Sequence: Synthetic polypeptide
MPMGSLQPLATLYLLGMLVASVLAAENLWVTVYYGVPVWKEAKTTLFCASDAKAYKKEVHNVWATHACVPTDPSPQELFLENVTENFNMWKNDMVDQMHEDIISLWDQSLKPCVKLTPLCVTLICSTATVNNRAVDEMKNCSFNTTTEIRDKKKKEYALFYRSDVVPLDETNNTSEYRLINCNTSACTQACPKVTFEPIPIHYCAPAGYAILKCNDETFNGTGPCSNVSTVQCTHGIRPVVSTQLLLNGSLAEKEIVIRSENLTNNAKIIIVHLHTPVEIVCTRPNNNTRKSVRIGPGQTFYATGDIIGDIKQAHCNISEEKWNETLQKVGIELQKHFPNKTIKYNQSAGGDMEITTHSFNCGGEFFYCNTSKLFNSTYNGTYISTNSTNSTSYITLQCRIKQIINMWQGVGRCMYAPPIAGNITCRSNITGLLLTRDGGINNVSNETETFRPAGGDMRDNWRSELYKYKVVKIEPLGVAPTRCKRRVVGRRRRRRAVGIGAVFLGFLGAAGSTMGAASMTLTVQARNLLSGIVQQQSNLLRAPEAQQHLLKLTVWGIKQLQARVLAVERYLRDQQLLGIWGCSGKLICCTNVPWNSSWSNRNLSEIWDNMTWLQWDKEISNYTQIIYGLLEESQNQQEKNEQDLLALDLPSTGG

SEQ ID NO: 28 - DNA, 1989 bp, Artificial Sequence
  Description of Artificial Sequence: Synthetic polynucleotide
gtcgacgccaccatgcccatgggatctctgcaacctctggccacactgtacctgctgggaatgctggtggcttctgtgctggccgccgagaatctgtgggtcacagtgtactatggcgtgcccgtgtggaaagaggccaagaccacactgttctgtgccagcgacgccaaggcctacaagaaagaggtgcacaacgtctgggccacacacgcctgtgtgcctaccgatccatctcctcaagagctgttcctggaaaacgtgaccgagaacttcaacatgtggaagaacgacatggtggaccagatgcacgaggacatcatcagcctgtgggaccagagcctgaagccttgcgtgaagctgacccctctgtgcgtgaccctgatctgtagcaccgccaccgtgaacaacagagccgtggacgagatgaagaactgcagcttcaacaccaccaccgagatccgggacaagaagaagaaagagtacgccctgttctatcggagcgacgtggtgcccctggacgagacaaacaacaccagcgagtaccggctgatcaactgcaacacctccgcctgcactcaggcctgtcctaaagtgaccttcgagcccattcctatccactactgtgcccctgccggctacgccatcctgaagtgcaacgacgagacattcaacggcacaggcccctgcagcaatgtgtccaccgtgcagtgtacccacggcatcagaccagtggtgtctacccagctgctgctgaatggaagcctggccgagaaagaaatcgtgatcagaagcgagaacctgaccaacaacgccaagatcatcattgtgcatctgcacacccctgtggaaatcgtgtgcacccggcctaacaacaacacccggaagtctgtgcggatcggccctggccagacattctatgccaccggcgatatcatcggcgacatcaagcaggcccactgcaacatcagcgaggaaaagtggaacgagacactgcagaaagtgggcatcgagctgcagaagcacttccccaacaagaccatcaagtacaaccagagcgctggcggcgacatggaaatcaccacacacagcttcaattgtggcggcgagttcttctactgcaataccagcaagctgttcaacagcacctacaacggcacctatatcagcaccaactccaccaatagcaccagctacatcaccctgcagtgccggatcaagcagatcatcaatatgtggcaaggcgtcggccggtgtatgtacgcccctcctatcgccggcaacatcacctgtcggagcaatatcacaggcctgctgctcaccagagatggcggcatcaacaacgtgtccaacgagacagaaaccttccggcctgccggcggagacatgagagacaattggagaagcgagctgtacaagtacaaggtggtcaagatcgagcccctgggcgtcgcaccaacacggtgcaagagaagagtcgtgggccgtcgtagaaggcggagagccgttggaattggcgccgtgttcctgggctttctgggagccgctggatctacaatgggcgctgccagcatgaccctgacagtgcaggctagaaatctgctgagcggcatcgtgcagcagcagagcaatctgctcagagcccctgaggctcagcagcacctcctgaaactgacagtgtggggaatcaagcagctgcaggccagagtgctggcagtggaaagatacctgagggaccagcagctcctcggaatctggggatgtagcggcaagctgatctgctgcaccaacgtgccctggaactccagctggtccaaccggaatctgagcgagatctgggataacatgacctggctgcagtgggacaaagagatcagcaactacacccagatcatctacggcctgctggaagagagccagaaccagcaagagaaaaacgagcaggacctgctggccctggacctgcctagcaccggaggatgataaggatcc

SEQ ID NO: 29 - protein, 30 aa, Artificial Sequence
  Description of Artificial Sequence: Synthetic polypeptide
CVKLTPLCVTLICSDATVKTGTVEEMKNCS

SEQ ID NO: 30 - protein, 30 aa, Artificial Sequence
  Description of Artificial Sequence: Synthetic polypeptide
CVKLTPLCVTLICSNATVKNGTVEEMKNCS

SEQ ID NO: 31 - protein, 30 aa, Artificial Sequence
  Description of Artificial Sequence: Synthetic polypeptide
CVKLTPLCVTLICSTATVNNRAVDEMKNCS

SEQ ID NO: 32 - protein, 44 aa, Human immunodeficiency virus 1
VEINCTRPNNNTRKSIHIGPGRAFYTTGEIIGDIRQAHCNISRA

SEQ ID NO: 33 - protein, 44 aa, Artificial Sequence
  Description of Artificial Sequence: Synthetic polypeptide
VEIVCTRPNNNTRKSVRIGPGQTFYATGDIIGDIKQAHCNISEE

SEQ ID NO: 34 - protein, 44 aa, Artificial Sequence
  Description of Artificial Sequence: Synthetic polypeptide
VEIVCTRPGHNTRKSVRIGPGQTFYATGDIIGDIRQAHCNINES

SEQ ID NO: 35 - protein, 43 aa, Artificial Sequence
  Description of Artificial Sequence: Synthetic polypeptide
NCSFNTTTEIRDKEKKEYALFYKPDIVPLSETNNTSEYRLINC

SEQ ID NO: 36 - protein, 43 aa, Artificial Sequence
  Description of Artificial Sequence: Synthetic polypeptide
NCSFNTTTEIRDKKKKEYALFYRSDVVPLDETNNTSEYRLINC

SEQ ID NO: 37 - DNA, 2445 bp, Artificial Sequence
  Description of Artificial Sequence: Synthetic polynucleotide
gtcgacgccaccatgcctatgggatctctgcagcctctggccacactgtacctgctgggaatgctggtggctagcgtgctggccaagggaaagctgtgggtcacagtgtactacggcgtgcccgtgtggaaagaggccaagaccacactgttctgcgcctccgatgccagagcctacgagaaagaggtgcacaacgtctgggccacacacgcctgtgtgcctaccgatccatctcctcaagagctggtgctgggcaacgtgaccgagaacttcaacatgtggaagaacgacatggtggaccagatgcacgaggacatcatcagcctgtgggaccagagcctgaagccttgcgtgaagctgacccctctgtgcgtgaccctgatctgttctgacgccaccgtgaaaaccggcaccgtggaagagatgaagaactgcagcttcaacaccaccaccgagatccgggacaagaagaagaaagagtacgccctgttctacaagcccgacatcgtgcccctgagcgagacaaacaacaccagcgagtaccggctgatcaactgcaacacctccgcctgcactcaggcctgtcctaaagtgaccttcgagcccattcctatccactactgtgcccctgccggctacgccatcctgaagtgcaacaacgagacattcaacggcacaggcccctgcagcaatgtgtccaccgtgcagtgtacccacggcatcagaccagtggtgtctacccagctgctgctgaatggaagcctggccgagaaagaaatcgtgatcagaagcgagaacctgaccaacaacgccaagatcatcatcgtccacctgaataccagcgtggaaatcgtgtgcacccggcctaacaacaacacccggaagtctgtgcggatcggccctggccagacattctatgccaccggcgatatcatcggcgacatcagacaggcccactgtaacatcagcgaggaaaagtggaacgacaccctgcagaaagtgggcatcgagctgcagaagcacttccccaacaagaccatcaagtacaaccagagcgctggcggcgacatggaaatcaccacacacagcttcaattgtggcggcgagttcttctactgcaataccagcaacctgttcaacgggacctacaatggcacctacatcagcaccaacagcagcgccaactccaccagcaccatcactctgcagtgccggatcaagcagatcatcaatatgtggcaaggcgtcggccggtgtatgtacgcccctcctatcgccggcaacatcacctgtcggagcaatatcacaggcctgctgctcaccagagatggcggcaccaatagcaacgaaaccgaaaccttcagacctgccggcggagacatgagagacaattggagaagcgagctgtacaagtacaaggtggtggaaatccagccactgggaatcgccccaacaggctgcaagagaagagtggttgaaggcggcggaggatctggcggaggcggatctgcagttggaatcggagctgtgttcctgggctttctgggagccgccggatctacaatgggagctgccagcatgaccctgaccgtgcaggctagaaatctgctgagcggcaaccccgactggctgcctgatatgacagtgtggggcatcaagcagctgcaggccagagtgctggccgtggaaagatacctgagagatcagcagctcctcggaatctggggctgtagcggcaagctgatctgctgcaccaacgtgccctggaacagctcctggtccaacagaaacctgtccgagatctgggataacatgacctggctgcagtgggacaaagagatctccaactacacccagatcatctacggcctgctggaagagagccagaaccagcaagagaaaaacgagcaggacctgctggccctggatggcggaggaagcggagatatcatcaagctgctgaacgagcaagtgaacaaagaaatgaactcctccaacctgtacatgagcatgagcagctggtgttacacccacagccttgatggcgccggactgttcctgtttgatcacgccgccgaggaatacgagcacgccaagaagctgatcatcttcctgaacgagaacaatgtgcccgtgcagctgaccagcattagcgccccagagcacaagttcgagggcctgacacagatctttcagaaggcctacgaacacgagcagcacatctccgagagcatcaacaacatcgtggaccacgccattaagagcaaggatcacgccaccttcaattttctgcagtggtacgtggccgaacagcacgaggaagaagtgctgttcaaggacatcctggacaagatcgagctgatcggcaacgagaaccacggcctgtatctggccgaccagtacgtgaagggcattgccaagagccggaagtcctgatgaggatcc

SEQ ID NO: 38 - DNA, 2472 bp, Artificial Sequence
  Description of Artificial Sequence: Synthetic polynucleotide
gtcgacgccaccatgcctatgggatctctgcagcctctggccacactgtacctgctgggaatgctggtggcttctgtgctggccgccgagaatctgtgggtcacagtgtactatggcgtgcccgtgtggaaagaggcctgcaccacactgttttgcgcctccgatgccagagcctacgagaagaaagtgcacaacgtgtgggccacacactgctgcgtgccaaccgatccatctcctcaagagctggtgctgggcaacgtgaccgagaacttcaacatgtggaagaacgacatggtggaccagatgcacgaggacatcatcagcctgtgggaccagagcctgaagccttgcgtgaagctgacccctctgtgcgtgaccctgatctgttctgacgccaccgtgaaaaccggcaccgtggaagagatgaagaactgcagcttcaacaccaccaccgagatccgggacaagaagaagaaagagtacgccctgttctacaagcccgacatcgtgcccctgagcgagacaaacaacaccagcgagtaccggctgatcaactgcaacacctccgcctgcacacaggcttgccccaaagtgaccttcgagcccattcctatccactactgtgcccctgccggctacgccatcctgaagtgcaacaacgagacattcaacggcacaggcccctgcagcaatgtgtccaccgtgcagtgtacccacggcatcagaccagtggtgtctacccagctgctgctgaatggaagcctggccgagaaagaaatcgtgatcagaagcgagaacctgaccaacaacgccaagatcatcattgtgcacctgaataccagcgtcgagatcgtgtgcacccggcctaacaacaacacccggaagtctgtgcggatcggccctggccagtggttttatgccaccggcgatatcatcggcgacatcagacaggcccactgtaacatcagcgaggaaaagtggaacgacaccctgcagaaagtgggcatcgagctgcagaagcacttccccaacaagaccatcaagtacaaccagagcgctggcggcgacatggaaatcaccacacacagcttcaattgtggcggcgagttcttctactgcaataccagcaacctgttcaacgggacctacaatggcacctacatcagcaccaacagcagcgccaactccaccagcaccatcactctgcagtgccggatcaagcagatcatcaatatgtggcaaggcgtcggccggtgtatgtacgcccctcctatcgccggcaacatcacctgtcggagcaatatcacaggcctgctgctcaccagagatggcggcaccaatagcaacgaaaccgaaaccttcagacctgccggcggagacatgagagacaattggagaagcgagctgtacaagtacaaggtggtcaagatcgagcccctgggcgtcgcacctacacggtgcaagagaagagtcgtgggccgtcgtagaaggcggagagccgttggaattggcgccgtgttcctgggctttctgggagccgctggatctacaatgggcgctgccagcatgaccctgacagtgcaggctagaaatctgctgagcggcatcgtgcagcagcagagcaattgtctgagagcccctgagtgccagcagcatctgctgaaactgaccgtgtggggcatcaagcagctgcaggcaagagtgctggcagtggaaagatacctgcgggaccagcagctcctcggaatctggggatgtagcggcaagctgatctgctgcaccaacgtgccctggaacagctcctggtccaacagaaacctgtccgagatctgggataacatgacctggctgcagtgggacaaagagatcagcaactacacccagatcatctacggcctgctggaagagagccagaaccagcaagagaaaaacgagcaggacctgctggccctggatggcggaggatctggcgacattatcaagctgctgaacgagcaagtgaacaaagaaatgaactcctccaacctgtacatgagcatgagcagctggtgttacacccacagccttgatggcgccggactgttcctgtttgatcacgccgccgaggaatacgagcacgccaagaagctgatcatcttcctgaacgagaacaatgtgcccgtgcagctgaccagcattagcgccccagagcacaagttcgagggcctgacacagatctttcagaaggcctacgaacacgagcagcacatctccgagagcatcaacaacatcgtggaccacgccattaagagcaaggatcacgccaccttcaattttctgcagtggtacgtggccgaacagcacgaggaagaggtgctgttcaaggacatcctggacaagattgagctgatcggcaacgagaaccacggcctgtatctggccgaccagtacgtgaagggaatcgccaagagcagaaagagctgatgaggatcc

SEQ ID NO: 39 - DNA, 2472 bp, Artificial Sequence
  Description of Artificial Sequence: Synthetic polynucleotide
gtcgacgccaccatgcctatgggatctctgcagcctctggccacactgtacctgctgggaatgctggtggcttctgtgctggccgccgagaatctgtgggtcacagtgtactatggcgtgcccgtgtggaaagaggccaagaccacactgttctgcgcctccgatgccagagcctacgagaaagaggtggccaacgtttgggccacacacgcctgtgtgcctaccgatccatctcctcaagagctggtgctgggcaacgtgaccgagaacttcaacatgtggaagaacgacatggtggaccagatgcacgaggacatcatcagcctgtgggaccagagcctgaagccttgcgtgaagctgacccctctgtgcgtgaccctgatctgttctgacgccaccgtgaaaaccggcaccgtggaagagatgaagaactgcagcttcaacaccaccaccgagatccgggacaagaagaagaaagagtacgccctgttctacaagcccgacatcgtgcccctgagcgagacaaacaacaccagcgagtaccggctgatcaactgcaacacctccgccgtgacacaggcttgccccaaagtgaccttcgagcccattcctatccactactgtgcccctgccggctacgccatcctgaagtgcaacaacgagacattcaacggcacaggcccctgcagcaatgtgtccaccgtgcagtgtacccacggcatcagaccagtggtgtctacccagctgctgctgaatggaagcctggccgagaaagaaatcgtgatcagaagcgagaacctgaccaacaacgccaagatcatcattgtgcacctgaataccagcgtcgagatcgtgtgcacccggcctaacaacaacacccggaagtctgtgcggatcggccctggccagacattctatgccaccggcgatatcatcggcgacatcagacaggcccactgtaacatcagcgaggaaaagtggaacgacaccctgcagaaagtgggcatcgagctgcagaagcacttccccaacaagaccatcaagtacaaccagagcgctggcggcgacatggaaatcaccacacacagcttcaattgtggcggcgagttcttctactgcaataccagcaacctgttcaacgggacctacaatggcacctacatcagcaccaacagcagcgccaactccaccagcaccatcactctgcagtgccggatcaagcagatcatcaatatgtggcaaggcgtgggcagagctatgtacgcccctcctatcgccggcaacatcacctgtcggagcaatatcacaggcctgctgctcaccagagatggcggcaccaatagcaacgaaaccgaaaccttcagacctgccggcggagacatgagagacaattggagaagcgagctgtacaagtacaaggtggtcaagatcgagcccctgggcgtcgcacctacacggtgcaagagaagagtcgtgggacgtagacgaaggcggagagccgttggaatcggagccgtgttcctgggctttctgggagccgctggatctacaatgggcgctgccagcatgaccctgacagtgcaggctagaaatctgctgagcggcatcgtgcagcagcagagcaatctgctcagagcccctgaggctcagcagcacctcctgaaactgacagtgtggggcatcaagcagctgcaggccagagtgctgacagtggaaagatacgccagggaccagcagctcctcggaatctggggatgtagcggcaagctgatctgctgcaccaacgtgccctggaacagctcctggtccaacagaaacctgtccgagatctgggataacatgacctggctgcagtgggacaaagagatcagcaactacacccagatcatctacggcctgctggaagagagccagaaccagcaagagaaaaacgagcaggacctgctggctctggatggcggaggaagcggagatatcatcaagctgctgaacgagcaagtgaacaaagaaatgaactcctccaacctgtacatgagcatgagcagctggtgttacacccacagccttgatggcgccggactgttcctgtttgatcacgccgccgaggaatacgagcacgccaagaagctgatcatcttcctgaacgagaacaatgtgcccgtgcagctgaccagcattagcgccccagagcacaagttcgagggcctgacacagatctttcagaaggcctacgaacacgagcagcacatctccgagagcatcaacaacatcgtggaccacgccattaagagcaaggatcacgccaccttcaattttctgcagtggtacgtggccgaacagcacgaggaagaagtgctgttcaaggacatcctggacaagattgagctgatcggcaacgagaaccacggcctgtatctggccgaccagtacgtgaagggaatcgccaagagccggaagtcctgatgaggatcc

SEQ ID NO: 40 - DNA, 2472 bp, Artificial Sequence
  Description of Artificial Sequence: Synthetic polynucleotide
gtcgacgccaccatgcctatgggatctctgcagcctctggccacactgtacctgctgggaatgctggtggcttctgtgctggccgccgagaatctgtgggtcacagtgtactatggcgtgcccgtgtggaaagaggccaagaccacactgttctgcgcctccgatgccagagcctacgagaaagaggtgcacaacatctgggccacacacgcctgcgtgccaaccgatccatctcctcaagaactggtgctgggcaacgtgaccgagaacttcaacatgtggaagaacgacatggtggaccagatgcacgaggacatcatcagcctgtgggaccagagcctgaagccttgcgtgaagctgacccctctgtgcgtgaccctgatctgttctgacgccaccgtgaaaaccggcaccgtggaagagatgaagaactgcagcttcaacaccaccaccgagatccgggacaagaagaagaaagagtacgccctgttctacaagcccgacatcgtgcccctgagcgagacaaacaacaccagcgagtaccggctgatcaactgcaacacctccgccgtgacacaagtgtgccccaagctgaccttcgagcccattcctatccactactgtgcccctgccggctacgccatcctgaagtgcaacaacgagacattcaacggcacaggcccctgcagcaatgtgtccaccgtgcagtgtacccacggcatcagacctgtgctgagcacacagctgctgctgaatggaagcctggccgagaaagaaatcgtgatcagaagcgagaacctgaccaacaacgccaagatcatcatcgtccacctgaataccagcgtggaaatcgtgtgcacccggcctaacaacaacacccggaagtctgtgcggatcggccctggccagacattctatgccaccggcgatatcatcggcgacatcagacaggcccactgtaacatcagcgaggaaaagtggaacgacaccctgcagaaagtgggcatcgagctgcagaagcacttccccaacaagaccatcaagtacaaccagagcgctggcggcgacatggaaatcaccacacacagcttcaattgtggcggcgagttcttctactgcaataccagcaacctgttcaacgggacctacaatggcacctacatcagcaccaacagcagcgccaactccaccagcaccatcactctgcagtgccggatcaagcagatcatcaatatgtggcaaggcgtgggcagagctatgtacgcccctcctatcgccggcaacatcacctgtcggagcaatatcacaggcctgctgctcaccagagatggcggcaccaatagcaacgaaaccgaaaccttcagacctgccggcggagacatgagagacaattggagaagcgagctgtacaagtacaaggtggtcaagatcgagcccctgggcgtcgcacctacacggtgcaagagaagagtcgtgggacgtagacgaaggcggagagccgttggaatcggagccgtgttcctgggctttctgggagccgctggatctacaatgggcgctgccagcatgaccctgacagtgcaggctagaaatctgctgagcggcatcgtgcagcagcagagcaatctgctcagagcccctgaggctcagcagcacctcctgaaactgacagtgtggggcatcaagcagctgcaggcaagagtgctggcagtggaaagatacctgcgggaccagcagctcctcggaatctggggatgtagcggcaagctgatctgctgcaccaacgtgccctggaacagcagctggtccaacagaaacctgtccgagatctgggataacatgacctggctgcagtgggacaaagagatcagcaactacacccagatcatctacggcctgctggaagagagccagaaccagcaagagaaaaacgagcaggacctgctggccctggatggcggaggatctggcgacattatcaagctgctgaacgagcaagtgaacaaagaaatgaacagctccaacctgtacatgagcatgtccagctggtgctacacccacagtcttgatggcgccggactgttcctgtttgaccacgccgccgaggaatacgagcacgccaagaagctgatcatcttcctgaacgagaacaatgtgcccgtgcagctgaccagcattagcgccccagagcacaagttcgagggcctgacacagatctttcagaaggcctacgaacacgagcagcacatctccgagagcatcaacaacatcgtggaccacgccattaagagcaaggatcacgccaccttcaattttctgcagtggtacgtggccgaacagcacgaggaagaagtgctgttcaaggacatcctggacaagattgagctgatcggcaacgagaaccacggcctgtatctggccgaccagtacgtgaagggaatcgccaagagccggaagtcctgatgaggatcc

SEQ ID NO: 41 - DNA, 2472 bp, Artificial Sequence
  Description of Artificial Sequence: Synthetic polynucleotide
gtcgacgccaccatgcctatgggatctctgcagcctctggccacactgtacctgctgggaatgctggtggcttctgtgctggccgccgagaatctgtgggtcacagtgtactatggcgtgcccgtgtggaaagaggccaagaccacactgttctgcgcctccgatgccagagcctacgagaaagaggtgcacaacatctgggccacacacgcctgcgtgccaaccgatccatctcctcaagaactggtgctgggcaacgtgaccgagaacttcaacatgtggaagaacgacatggtggaccagatgcacgaggacatcatcagcctgtgggaccagagcctgaagccttgcgtgaagctgacccctctgtgcgtgaccctgatctgttctgacgccaccgtgaaaaccggcaccgtggaagagatgaagaactgcagcttcaacaccaccaccgagatccgggacaagaagaagaaagagtacgccctgttctacaagcccgacatcgtgcccctgagcgagacaaacaacaccagcgagtaccggctgatcaactgcaacacaagcgccgtgacaatggtctgccccaagctgaccttcgagcccattcctatccactactgtgcccctgccggctacgccatcctgaagtgcaacaacgagacattcaacggcacaggcccctgcagcaatgtgtccaccgtgcagtgtacccacggcatcagacctgtgctgagcacacagctgctgctgaatggaagcctggccgagaaagaaatcgtgatcagaagcgagaacctgaccaacaacgccaagatcatcatcgtccacctgaacacctccgtggaaatcgtgtgcacccggcctctgaatctgaccagaaagagcgtgcggatcggccctggccagaccttttatgccatgggcgacatcatcggcgacatccggcaggcccactgcaacatctctgaggaaaagtggaacgacaccctgcagaaagtgggcatcgagctgcagaagcacttccccaacaagaccatcaagtacaaccagagcgctggcggcgacatggaaatcaccacacacagcttcaattgtggcggcgagttcttctactgcaataccagcaacctgttcaacgggacctacaatggcacctacatcagcaccaacagcagcgccaactccaccagcaccatcactctgcagtgccggatcaagatgatcattaacatgtggcaaggcgtcggcagggctatgtacgcccctcctatcgccggcaacatcacctgtcggagcaatatcacaggcctgctgctcaccagagatggcggcaccaatagcaacgaaaccgaaaccttcagacctgccggcggagacatgagagacaattggagaagcgagctgtacaagtacaaggtggtcaagatcgagcccctgggcgtcgcacctacacggtgcaagagaagagtcgtgggccgtcgtagaaggcggagagccgttggaattggcgccgtgttcctgggctttctgggagccgctggatctacaatgggcgctgccagcatgaccctgacagtgcaggctagaaatctgctgagcggcatcgtgcagcagcagagcaatctgctcagagcccctgaggctcagcagcacctcctgaaactgacagtgtggggcatcaagcagctgcaggcaagagtgctggcagtggaaagatacctgcgggaccagcagctcctcggaatctggggatgtagcggcaagctgatctgctgcaccaacgtgccctggaacagcagctggtccaacagaaacctgtccgagatctgggataacatgacctggctgcagtgggacaaagagatcagcaactacacccagatcatctacggcctgctggaagagagccagaaccagcaagagaaaaacgagcaggacctgctggccctggatggcggaggatctggcgatatcatcaagctgctgaacgagcaagtgaacaaagaaatgaacagctccaacctgtacatgagcatgtccagctggtgctacacccacagtcttgatggcgccggactgttcctgtttgaccacgccgccgaggaatacgagcacgccaagaagctgatcattttcctgaacgagaacaacgtgccagtgcagctgaccagcattagcgccccagagcacaagttcgagggcctgacacagatctttcagaaggcctacgaacacgagcagcacatcagcgagagcatcaacaacatcgtggaccacgccattaagagcaaggatcacgccaccttcaattttctgcagtggtacgtggccgaacagcacgaggaagaagtgctgttcaaggacatcctggacaagattgagctgatcggcaacgagaaccacggcctgtatctggccgaccagtacgtgaagggaatcgccaagagccggaagtcctgatgaggatcc

SEQ ID NO: 42 - DNA, 2478 bp, Artificial Sequence
  Description of Artificial Sequence: Synthetic polynucleotide
gtcgacgccaccatgcctatgggatctctgcagcctctggccacactgtacctgctgggaatgctggtggcttctgtgctggccgccgagaatctgtgggtcacagtgtactatggcgtgcccgtgtggaaagaggccaagaccacactgttctgcgcctccgatgccagagcctacgagaaagaggtgcacaacgtctgggccacacacgcctgtgtgcctaccgatccatctcctcaagagctggtgctgggcaacgtgaccgagaacttcaacatgtggaagaacgacatggtggaccagatgcacgaggacatcatcagcctgtggtgccagtctctgaagccctgcgtgaagctgacccctctgtgtgtgaccctgatctgctctgacgccaccgtgaaaaccggcaccgtggaagagatgaagaactgcagcttcaacaccaccaccgagatccgggacaagaagaagaaagagtacgccctgttctacaagcccgacatcgtgcccctgagcgagacaaacaacaccagcgagtaccggctgatcaactgcaacacctccgccgtgacacaggcttgccccaaagtgaccttcgagcccattcctatccactactgtgcccctgccggctacgccatcctgaagtgcaacaacgagacattcaacggcacaggcccctgcagcaatgtgtccaccgtgcagtgtacccacggcatcagaccagtggtgtctacccagctgctgctgaatggaagcctggccgagaaagaaatcgtgatcagaagcgagaacctgaccaacaacgccaagatcatcatcgtccacctgaataccagcgtggaaatcgtgtgcacccggcctaacaacaacacccggaagtctgtgcggatcggccctggccagacattctatgccaccggcgatatcatcggcgacatcagacaggcccactgtaacatcagcgaggaaaagtggaacgacaccctgcagaaagtgggcatcgagctgcagaagcacttccccaacaagaccatcaagtacaaccagagcgctggcggcgacatggaaatcaccacacacagcttcaattgtggcggcgagttcttctactgcaataccagcaacctgttcaacgggacctacaatggcacctacatcagcaccaacagcagcgccaactccaccagcaccatcactctgcagtgccggatcaagcagatcatcaatatgtggcaaggctgcggcgtgggcagagctatgtatgcccctcctatcgccggcaacatcacctgtcggagcaatatcacaggcctgctgctcaccagagatggcggcaccaatagcaacgaaaccgaaaccttcagacctgccggcggagacatgagagacaattggagaagcgagctgtacaagtacaaggtggtcaagatcgagcccctgggcgtcgcacctacacggtgcaagagaagagtcgtgggacgtagacgaaggcggagagccgttggaatcggagccgtgttcctgggctttctgggagccgctggatctacaatgggcgctgccagcatgaccctgacagtgcaggctagaaatctgctgagcggcatcgtgcagcagcagagcaatctgctcagagcccctgaggctcagcagcacctcctgaaactgacagtgtggggcatcaagcagctgcaggcaagagtgctggcagtggaaagatacctgcgggaccagcagctcctcggaatctggggatgtagcggcaagctgatctgttgcaccaacgtgccctggaacagctcctggtccaacagaaacctgtccgagatctgggataacatgacctggctgcagtgggacaaagagatcagcaactacacccagatcatctacggcctgctggaagagagccagaaccagcaagagaaaaacgagcaggacctgctggccctggatggcggaggatctggcgacattatcaagctgctgaacgagcaagtgaacaaagaaatgaactcctccaacctgtacatgagcatgagcagctggtgttacacccacagccttgatggcgccggactgttcctgtttgatcacgccgccgaggaatacgagcacgccaagaagctgatcatcttcctgaacgagaacaatgtgcccgtgcagctgaccagcattagcgccccagagcacaagttcgagggcctgacacagatctttcagaaggcctacgaacacgagcagcacatctccgagagcatcaacaacatcgtggaccacgccattaagagcaaggatcacgccaccttcaattttctgcagtggtacgtggccgaacagcacgaggaagaagtgctgttcaaggacatcctggacaagattgagctgatcggcaacgagaaccacggcctgtatctggccgaccagtacgtgaagggaatcgccaagagccggaagtcctgatgaggatcc

SEQ ID NO: 43 - DNA, 2472 bp, Artificial Sequence
  Description of Artificial Sequence: Synthetic polynucleotide
gtcgacgccaccatgcctatgggatctctgcagcctctggccacactgtacctgctgggaatgctggtggcttctgtgctggccgccgagaatctgtgggtcacagtgtactatggcgtgcccgtgtggaaagaggccaagaccacactgttctgcgcctccgatgccagagcctacgagaaagaggtgcacaacgtctgggccacacacgcctgtgtgcctaccgatccatctcctcaagagctggtgctgggcaacgtgaccgagaacttcaacatgtggaagaacgacatggtggaccagatgcacgaggacatcatcagcctgtgggaccagagcctgaagccttgcgtgaagctgacccctctgtgcgtgaccctgatctgttctgacgccaccgtgaaaaccggcaccgtggaagagatgaagaactgcagcttcaacaccaccaccgagatccgggacaagaagaagaaagagtacgccctgttctacaagcccgacatcgtgcccctgagcgagacaaacaacaccagcgagtaccggctgatcaactgcaacacctccgcctgcactcaggcctgtcctaaagtgaccttcgagcccattcctatccactactgtgcccctgccggctacgccatcctgaagtgcaacaacgagacattcaacggcacaggcccctgcagcaatgtgtccaccgtgcagtgtacccacggcatcagaccagtggtgtctacccagctgctgctgaatggaagcctggccgagaaagaaatcgtgatcagaagcgagaacctgaccaacaacgccaagatcatcatcgtccacctgaataccagcgtggaaatcgtgtgcacccggcctaacaacaacacccggaagtctgtgcggatcggccctggccagacattctatgccaccggcgatatcatcggcgacatcagacaggcccactgtaacatcagcgaggaaaagtggaacgacaccctgcagaaagtgggcatcgagctgcagaagcacttccccaacaagaccatcaagtacaaccagagcgctggcggcgacatggaaatcaccacacacagcttcaattgtggcggcgagttcttctactgcaataccagcaacctgttcaacgggacctacaatggcacctacatcagcaccaacagcagcgccaactccaccagcaccatcactctgcagtgccggatcaagcagatcatcaatatgtggcaaggcgtcggccggtgtatgtacgcccctcctatcgccggcaacatcacctgtcggagcaatatcacaggcctgctgctcaccagagatggcggcaccaatagcaacgaaaccgaaaccttcagacctgccggcggagacatgagagacaattggagaagcgagctgtacaagtacaaggtggtcaagatcgagcccctgggcgtcgcacctacacggtgcaagagaagagtcgtgggccgtcgtagaaggcggagagccgttggaattggcgccgtgttcctgggctttctgggagccgctggatctacaatgggcgctgccagcatgaccctgacagtgcaggctagaaatctgctgagcggcatcgtgcagcagcagagcaatctgctcagagcccctgaggctcagcagcacctcctgaaactgacagtgtggggcatcaagcagctgcaggcaagagtgctggcagtggaaagatacctgcgggaccagcagctcctcggaatctggggatgtagcggcaagctgatctgctgcaccaacgtgccctggaacagctcctggtccaacagaaacctgtccgagatctgggataacatgacctggctgcagtgggacaaagagatcagcaactacacccagatcatctacggcctgctggaagagagccagaaccagcaagagaaaaacgagcaggacctgctggccctggatggcggaggatctggcgacattatcaagctgctgaacgagcaagtgaacaaagaaatgaactcctccaacctgtacatgagcatgagcagctggtgttacacccacagccttgatggcgccggactgttcctgtttgatcacgccgccgaggaatacgagcacgccaagaagctgatcatcttcctgaacgagaacaatgtgcccgtgcagctgaccagcattagcgccccagagcacaagttcgagggcctgacacagatctttcagaaggcctacgaacacgagcagcacatctccgagagcatcaacaacatcgtggaccacgccattaagagcaaggatcacgccaccttcaattttctgcagtggtacgtggccgaacagcacgaggaagaagtgctgttcaaggacatcctggacaagattgagctgatcggcaacgagaaccacggcctgtatctggccgaccagtacgtgaagggaatcgccaagagccggaagtcctgatgaggatcc

SEQ ID NO: 44 - protein, 807 aa, Artificial Sequence
  Description of Artificial Sequence: Synthetic polypeptide
MPMGSLQPLATLYLLGMLVASVLAKGKLWVTVYYGVPVWKEAKTTLFCASDARAYEKEVHNVWATHACVPTDPSPQELVLGNVTENFNMWKNDMVDQMHEDIISLWDQSLKPCVKLTPLCVTLICSDATVKTGTVEEMKNCSFNTTTEIRDKKKKEYALFYKPDIVPLSETNNTSEYRLINCNTSACTQACPKVTFEPIPIHYCAPAGYAILKCNNETFNGTGPCSNVSTVQCTHGIRPVVSTQLLLNGSLAEKEIVIRSENLTNNAKIIIVHLNTSVEIVCTRPNNNTRKSVRIGPGQTFYATGDIIGDIRQAHCNISEEKWNDTLQKVGIELQKHFPNKTIKYNQSAGGDMEITTHSFNCGGEFFYCNTSNLFNGTYNGTYISTNSSANSTSTITLQCRIKQIINMWQGVGRCMYAPPIAGNITCRSNITGLLLTRDGGTNSNETETFRPAGGDMRDNWRSELYKYKVVEIQPLGIAPTGCKRRVVEGGGGSGGGGSAVGIGAVFLGFLGAAGSTMGAASMTLTVQARNLLSGNPDWLPDMTVWGIKQLQARVLAVERYLRDQQLLGIWGCSGKLICCTNVPWNSSWSNRNLSEIWDNMTWLQWDKEISNYTQIIYGLLEESQNQQEKNEQDLLALDGGGSGDIIKLLNEQVNKEMNSSNLYMSMSSWCYTHSLDGAGLFLFDHAAEEYEHAKKLIIFLNENNVPVQLTSISAPEHKFEGLTQIFQKAYEHEQHISESINNIVDHAIKSKDHATFNFLQWYVAEQHEEEVLFKDILDKIELIGNENHGLYLADQYVKGIAKSRKS

SEQ ID NO: 45 - protein, 816 aa, Artificial Sequence
  Description of Artificial Sequence: Synthetic polypeptide
MPMGSLQPLATLYLLGMLVASVLAAENLWVTVYYGVPVWKEACTTLFCASDARAYEKKVHNVWATHCCVPTDPSPQELVLGNVTENFNMWKNDMVDQMHEDIISLWDQSLKPCVKLTPLCVTLICSDATVKTGTVEEMKNCSFNTTTEIRDKKKKEYALFYKPDIVPLSETNNTSEYRLINCNTSACTQACPKVTFEPIPIHYCAPAGYAILKCNNETFNGTGPCSNVSTVQCTHGIRPVVSTQLLLNGSLAEKEIVIRSENLTNNAKIIIVHLNTSVEIVCTRPNNNTRKSVRIGPGQWFYATGDIIGDIRQAHCNISEEKWNDTLQKVGIELQKHFPNKTIKYNQSAGGDMEITTHSFNCGGEFFYCNTSNLFNGTYNGTYISTNSSANSTSTITLQCRIKQIINMWQGVGRCMYAPPIAGNITCRSNITGLLLTRDGGTNSNETETFRPAGGDMRDNWRSELYKYKVVKIEPLGVAPTRCKRRVVGRRRRRRAVGIGAVFLGFLGAAGSTMGAASMTLTVQARNLLSGIVQQQSNCLRAPECQQHLLKLTVWGIKQLQARVLAVERYLRDQQLLGIWGCSGKLICCTNVPWNSSWSNRNLSEIWDNMTWLQWDKEISNYTQIIYGLLEESQNQQEKNEQDLLALDGGGSGDIIKLLNEQVNKEMNSSNLYMSMSSWCYTHSLDGAGLFLFDHAAEEYEHAKKLIIFLNENNVPVQLTSISAPEHKFEGLTQIFQKAYEHEQHISESINNIVDHAIKSKDHATFNFLQWYVAEQHEEEVLFKDILDKIELIGNENHGLYLADQYVKGIAKSRKS

SEQ ID NO: 46 - protein, 816 aa, Artificial Sequence
  Description of Artificial Sequence: Synthetic polypeptide
MPMGSLQPLATLYLLGMLVASVLAAENLWVTVYYGVPVWKEAKTTLFCASDARAYEKEVANVWATHACVPTDPSPQELVLGNVTENFNMWKNDMVDQMHEDIISLWDQSLKPCVKLTPLCVTLICSDATVKTGTVEEMKNCSFNTTTEIRDKKKKEYALFYKPDIVPLSETNNTSEYRLINCNTSAVTQACPKVTFEPIPIHYCAPAGYAILKCNNETFNGTGPCSNVSTVQCTHGIRPVVSTQLLLNGSLAEKEIVIRSENLTNNAKIIIVHLNTSVEIVCTRPNNNTRKSVRIGPGQTFYATGDIIGDIRQAHCNISEEKWNDTLQKVGIELQKHFPNKTIKYNQSAGGDMEITTHSFNCGGEFFYCNTSNLFNGTYNGTYISTNSSANSTSTITLQCRIKQIINMWQGVGRAMYAPPIAGNITCRSNITGLLLTRDGGTNSNETETFRPAGGDMRDNWRSELYKYKVVKIEPLGVAPTRCKRRVVGRRRRRRAVGIGAVFLGFLGAAGSTMGAASMTLTVQARNLLSGIVQQQSNLLRAPEAQQHLLKLTVWGIKQLQARVLTVERYARDQQLLGIWGCSGKLICCTNVPWNSSWSNRNLSEIWDNMTWLQWDKEISNYTQIIYGLLEESQNQQEKNEQDLLALDGGGSGDIIKLLNEQVNKEMNSSNLYMSMSSWCYTHSLDGAGLFLFDHAAEEYEHAKKLIIFLNENNVPVQLTSISAPEHKFEGLTQIFQKAYEHEQHISESINNIVDHAIKSKDHATFNFLQWYVAEQHEEEVLFKDILDKIELIGNENHGLYLADQYVKGIAKSRKS

SEQ ID NO: 47 - protein, 816 aa, Artificial Sequence
  Description of Artificial Sequence: Synthetic polypeptide
MPMGSLQPLATLYLLGMLVASVLAAENLWVTVYYGVPVWKEAKTTLFCASDARAYEKEVHNIWATHACVPTDPSPQELVLGNVTENFNMWKNDMVDQMHEDIISLWDQSLKPCVKLTPLCVTLICSDATVKTGTVEEMKNCSFNTTTEIRDKKKKEYALFYKPDIVPLSETNNTSEYRLINCNTSAVTQVCPKLTFEPIPIHYCAPAGYAILKCNNETFNGTGPCSNVSTVQCTHGIRPVLSTQLLLNGSLAEKEIVIRSENLTNNAKIIIVHLNTSVEIVCTRPNNNTRKSVRIGPGQTFYATGDIIGDIRQAHCNISEEKWNDTLQKVGIELQKHFPNKTIKYNQSAGGDMEITTHSFNCGGEFFYCNTSNLFNGTYNGTYISTNSSANSTSTITLQCRIKQIINMWQGVGRAMYAPPIAGNITCRSNITGLLLTRDGGTNSNETETFRPAGGDMRDNWRSELYKYKVVKIEPLGVAPTRCKRRVVGRRRRRRAVGIGAVFLGFLGAAGSTMGAASMTLTVQARNLLSGIVQQQSNLLRAPEAQQHLLKLTVWGIKQLQARVLAVERYLRDQQLLGIWGCSGKLICCTNVPWNSSWSNRNLSEIWDNMTWLQWDKEISNYTQIIYGLLEESQNQQEKNEQDLLALDGGGSGDIIKLLNEQVNKEMNSSNLYMSMSSWCYTHSLDGAGLFLFDHAAEEYEHAKKLIIFLNENNVPVQLTSISAPEHKFEGLTQIFQKAYEHEQHISESINNIVDHAIKSKDHATFNFLQWYVAEQHEEEVLFKDILDKIELIGNENHGLYLADQYVKGIAKSRKS

SEQ ID NO: 48 - protein, 816 aa, Artificial Sequence
  Description of Artificial Sequence: Synthetic polypeptide
MPMGSLQPLATLYLLGMLVASVLAAENLWVTVYYGVPVWKEAKTTLFCASDARAYEKEVHNIWATHACVPTDPSPQELVLGNVTENFNMWKNDMVDQMHEDIISLWDQSLKPCVKLTPLCVTLICSDATVKTGTVEEMKNCSFNTTTEIRDKKKKEYALFYKPDIVPLSETNNTSEYRLINCNTSAVTMVCPKLTFEPIPIHYCAPAGYAILKCNNETFNGTGPCSNVSTVQCTHGIRPVLSTQLLLNGSLAEKEIVIRSENLTNNAKIIIVHLNTSVEIVCTRPLNLTRKSVRIGPGQTFYAMGDIIGDIRQAHCNISEEKWNDTLQKVGIELQKHFPNKTIKYNQSAGGDMEITTHSFNCGGEFFYCNTSNLFNGTYNGTYISTNSSANSTSTITLQCRIKMIINMWQGVGRAMYAPPIAGNITCRSNITGLLLTRDGGTNSNETETFRPAGGDMRDNWRSELYKYKVVKIEPLGVAPTRCKRRVVGRRRRRRAVGIGAVFLGFLGAAGSTMGAASMTLTVQARNLLSGIVQQQSNLLRAPEAQQHLLKLTVWGIKQLQARVLAVERYLRDQQLLGIWGCSGKLICCTNVPWNSSWSNRNLSEIWDNMTWLQWDKEISNYTQIIYGLLEESQNQQEKNEQDLLALDGGGSGDIIKLLNEQVNKEMNSSNLYMSMSSWCYTHSLDGAGLFLFDHAAEEYEHAKKLIIFLNENNVPVQLTSISAPEHKFEGLTQIFQKAYEHEQHISESINNIVDHAIKSKDHATFNFLQWYVAEQHEEEVLFKDILDKIELIGNENHGLYLADQYVKGIAKSRKS

SEQ ID NO: 49 - protein, 818 aa, Artificial Sequence
  Description of Artificial Sequence: Synthetic polypeptide
MPMGSLQPLATLYLLGMLVASVLAAENLWVTVYYGVPVWKEAKTTLFCASDARAYEKEVHNVWATHACVPTDPSPQELVLGNVTENFNMWKNDMVDQMHEDIISLWCQSLKPCVKLTPLCVTLICSDATVKTGTVEEMKNCSFNTTTEIRDKKKKEYALFYKPDIVPLSETNNTSEYRLINCNTSAVTQACPKVTFEPIPIHYCAPAGYAILKCNNETFNGTGPCSNVSTVQCTHGIRPVVSTQLLLNGSLAEKEIVIRSENLTNNAKIIIVHLNTSVEIVCTRPNNNTRKSVRIGPGQTFYATGDIIGDIRQAHCNISEEKWNDTLQKVGIELQKHFPNKTIKYNQSAGGDMEITTHSFNCGGEFFYCNTSNLFNGTYNGTYISTNSSANSTSTITLQCRIKQIINMWQGCGVGRAMYAPPIAGNITCRSNITGLLLTRDGGTNSNETETFRPAGGDMRDNWRSELYKYKVVKIEPLGVAPTRCKRRVVGRRRRRRAVGIGAVFLGFLGAAGSTMGAASMTLTVQARNLLSGIVQQQSNLLRAPEAQQHLLKLTVWGIKQLQARVLAVERYLRDQQLLGIWGCSGKLICCTNVPWNSSWSNRNLSEIWDNMTWLQWDKEISNYTQIIYGLLEESQNQQEKNEQDLLALDGGGSGDIIKLLNEQVNKEMNSSNLYMSMSSWCYTHSLDGAGLFLFDHAAEEYEHAKKLIIFLNENNVPVQLTSISAPEHKFEGLTQIFQKAYEHEQHISESINNIVDHAIKSKDHATFNFLQWYVAEQHEEEVLFKDILDKIELIGNENHGLYLADQYVKGIAKSRKS

SEQ ID NO: 50 - protein, 816 aa, Artificial Sequence
  Description of Artificial Sequence: Synthetic polypeptide
MPMGSLQPLATLYLLGMLVASVLAAENLWVTVYYGVPVWKEAKTTLFCASDARAYEKEVHNVWATHACVPTDPSPQELVLGNVTENFNMWKNDMVDQMHEDIISLWDQSLKPCVKLTPLCVTLICSDATVKTGTVEEMKNCSFNTTTEIRDKKKKEYALFYKPDIVPLSETNNTSEYRLINCNTSACTQACPKVTFEPIPIHYCAPAGYAILKCNNETFNGTGPCSNVSTVQCTHGIRPVVSTQLLLNGSLAEKEIVIRSENLTNNAKIIIVHLNTSVEIVCTRPNNNTRKSVRIGPGQTFYATGDIIGDIRQAHCNISEEKWNDTLQKVGIELQKHFPNKTIKYNQSAGGDMEITTHSFNCGGEFFYCNTSNLFNGTYNGTYISTNSSANSTSTITLQCRIKQIINMWQGVGRCMYAPPIAGNITCRSNITGLLLTRDGGTNSNETETFRPAGGDMRDNWRSELYKYKVVKIEPLGVAPTRCKRRVVGRRRRRRAVGIGAVFLGFLGAAGSTMGAASMTLTVQARNLLSGIVQQQSNLLRAPEAQQHLLKLTVWGIKQLQARVLAVERYLRDQQLLGIWGCSGKLICCTNVPWNSSWSNRNLSEIWDNMTWLQWDKEISNYTQIIYGLLEESQNQQEKNEQDLLALDGGGSGDIIKLLNEQVNKEMNSSNLYMSMSSWCYTHSLDGAGLFLFDHAAEEYEHAKKLIIFLNENNVPVQLTSISAPEHKFEGLTQIFQKAYEHEQHISESINNIVDHAIKSKDHATFNFLQWYVAEQHEEEVLFKDILDKIELIGNENHGLYLADQYVKGIAKSRKS

SEQ ID NO: 51 - DNA, 2532 bp, Artificial Sequence
  Description of Artificial Sequence: Synthetic polynucleotide
gtcgacgccaccatgcctatgggatctctgcagcctctggccacactgtacctgctgggaatgctggtggcttctgtgctggccgccgagaatctgtgggtcacagtgtactatggcgtgcccgtgtggaaagaggccaagaccacactgttctgcgcctccgatgccagagcctacgagaaagaggtgcacaacgtctgggccacacacgcctgtgtgcctaccgatccatctcctcaagagctggtgctgggcaacgtgaccgagaacttcaacatgtggaagaacgacatggtggaccagatgcacgaggacatcatcagcctgtgggaccagagcctgaagccttgcgtgaagctgacccctctgtgcgtgaccctgatctgttctgacgccaccgtgaaaaccggcaccgtggaagagatgaagaactgcagcttcaacaccaccaccgagatccgggacaagaagaagaaagagtacgccctgttctacaagcccgacatcgtgcccctgagcgagacaaacaacaccagcgagtaccggctgatcaactgcaacacctccgcctgcactcaggcctgtcctaaagtgaccttcgagcccattcctatccactactgtgcccctgccggctacgccatcctgaagtgcaacaacgagacattcaacggcacaggcccctgcagcaatgtgtccaccgtgcagtgtacccacggcatcagaccagtggtgtctacccagctgctgctgaatggaagcctggccgagaaagaaatcgtgatcagaagcgagaacctgaccaacaacgccaagatcatcatcgtccacctgaataccagcgtggaaatcgtgtgcacccggcctaacaacaacacccggaagtctgtgcggatcggccctggccagacattctatgccaccggcgatatcatcggcgacatcaagcaggcccactgcaacatcagcgaggaaaagtggaacgacaccctgcagaaagtgggcatcgagctgcagaagcacttccccaacaagaccatcaagtacaaccagagcgctggcggcgacatggaaatcaccacacacagcttcaattgtggcggcgagttcttctactgcaataccagcaacctgttcaacgggacctacaatggcacctacatcagcaccaacagcagcgccaactccaccagcaccatcactctgcagtgccggatcaagcagatcatcaatatgtggcaaggcgtcggccggtgtatgtacgcccctcctatcgccggcaacatcacctgtcggagcaatatcacaggcctgctgctcaccagagatggcggcaccaatagcaacgaaaccgaaaccttcagacctgccggcggagacatgagagacaattggagaagcgagctgtacaagtacaaggtggtcaagatcgagcccctgggcgtcgcacctacacggtgcaagagaagagtcgtgggccgtcgtagaaggcggagagccgttggaattggcgccgtgttcctgggctttctgggagccgctggatctacaatgggcgctgccagcatgaccctgacagtgcaggctagaaatctgctgagcggcatcgtgcagcagcagagcaatctgctcagagcccctgaggctcagcagcacctcctgaaactgacagtgtggggaatcaagcagctgcaggccagagtgctggcagtggaaagatacctgagggaccagcagctcctcggaatctggggctgttctggcaagctgatctgctgcaccaacgtgccctggaacagctcctggtccaacagaaacctgtccgagatctgggataacatgacctggctgcagtgggacaaagagatcagcaactacacccagatcatctacggcctgctggaagagagccagaaccagcaagagaaaaacgagcaggacctgctggccctggatggcggaggatctggcggaggcggttctggcggcggaggaagcggaggcggaggctcaggtggtggcggatctggagatatcatcaagctgctgaacgagcaagtgaacaaagaaatgaactcctccaacctgtacatgagcatgagcagctggtgttacacccacagccttgatggcgccggactgttcctgtttgatcacgccgccgaggaatacgagcacgccaagaagctgatcatcttcctgaacgagaacaatgtgcccgtgcagctgaccagcattagcgccccagagcacaagttcgagggcctgacacagatctttcagaaggcctacgaacacgagcagcacatctccgagagcatcaacaacatcgtggaccacgccattaagtccaaggatcacgccaccttcaattttctgcagtggtacgtggccgaacagcacgaggaagaagtgctgttcaaggacatcctggacaagattgagctgatcggcaacgagaaccacggcctgtatctggccgaccagtacgtgaagggaatcgccaagagccggaagtcctgatgaggatcc

SEQ ID NO: 52 - DNA, 2517 bp, Artificial Sequence
  Description of Artificial Sequence: Synthetic polynucleotide
gtcgacgccaccatgcctatgggatctctgcagcctctggccacactgtacctgctgggaatgctggtggcttctgtgctggccgccgagaatctgtgggtcacagtgtactatggcgtgcccgtgtggaaagaggccaagaccacactgttctgcgcctccgatgccagagcctacgagaaagaggtgcacaacgtctgggccacacacgcctgtgtgcctaccgatccatctcctcaagagctggtgctgggcaacgtgaccgagaacttcaacatgtggaagaacgacatggtggaccagatgcacgaggacatcatcagcctgtgggaccagagcctgaagccttgcgtgaagctgacccctctgtgcgtgaccctgatctgttctgacgccaccgtgaaaaccggcaccgtggaagagatgaagaactgcagcttcaacaccaccaccgagatccgggacaagaagaagaaagagtacgccctgttctacaagcccgacatcgtgcccctgagcgagacaaacaacaccagcgagtaccggctgatcaactgcaacacctccgcctgcactcaggcctgtcctaaagtgaccttcgagcccattcctatccactactgtgcccctgccggctacgccatcctgaagtgcaacaacgagacattcaacggcacaggcccctgcagcaatgtgtccaccgtgcagtgtacccacggcatcagaccagtggtgtctacccagctgctgctgaatggaagcctggccgagaaagaaatcgtgatcagaagcgagaacctgaccaacaacgccaagatcatcatcgtccacctgaataccagcgtggaaatcgtgtgcacccggcctaacaacaacacccggaagtctgtgcggatcggccctggccagacattctatgccaccggcgatatcatcggcgacatcaagcaggcccactgcaacatcagcgaggaaaagtggaacgacaccctgcagaaagtgggcatcgagctgcagaagcacttccccaacaagaccatcaagtacaaccagagcgctggcggcgacatggaaatcaccacacacagcttcaattgtggcggcgagttcttctactgcaataccagcaacctgttcaacgggacctacaatggcacctacatcagcaccaacagcagcgccaactccaccagcaccatcactctgcagtgccggatcaagcagatcatcaatatgtggcaaggcgtcggccggtgtatgtacgcccctcctatcgccggcaacatcacctgtcggagcaatatcacaggcctgctgctcaccagagatggcggcaccaatagcaacgaaaccgaaaccttcagacctgccggcggagacatgagagacaattggagaagcgagctgtacaagtacaaggtggtcaagatcgagcccctgggcgtcgcacctacacggtgcaagagaagagtcgtgggccgtcgtagaaggcggagagccgttggaattggcgccgtgttcctgggctttctgggagccgctggatctacaatgggcgctgccagcatgaccctgacagtgcaggctagaaatctgctgagcggcatcgtgcagcagcagagcaatctgctcagagcccctgaggctcagcagcacctcctgaaactgacagtgtggggaatcaagcagctgcaggccagagtgctggcagtggaaagatacctgagggaccagcagctcctcggaatctggggctgttctggcaagctgatctgctgcaccaacgtgccctggaacagctcctggtccaacagaaacctgtccgagatctgggataacatgacctggctgcagtgggacaaagagatcagcaactacacccagatcatctacggcctgctggaagagagccagaaccagcaagagaaaaacgagcaggacctgctggccctggatggcggaggatctggcggaggcggttctggcggcggaggaagcggaggcggaggctcaggtgatatcatcaagctgctgaacgagcaagtgaacaaagaaatgaactcctccaacctgtacatgagcatgagcagctggtgttacacccacagccttgatggcgccggactgttcctgtttgatcacgccgccgaggaatacgagcacgccaagaagctgatcatcttcctgaacgagaacaatgtgcccgtgcagctgaccagcattagcgccccagagcacaagttcgagggcctgacacagatctttcagaaggcctacgaacacgagcagcacatctccgagagcatcaacaacatcgtggaccacgccattaagtccaaggatcacgccaccttcaattttctgcagtggtacgtggccgaacagcacgaggaagaagtgctgttcaaggacatcctggacaagattgagctgatcggcaacgagaaccacggcctgtatctggccgaccagtacgtgaagggaatcgccaagagccggaagtcctgatgaggatcc

SEQ ID NO: 53 - DNA, 2502 bp, Artificial Sequence
  Description of Artificial Sequence: Synthetic polynucleotide
gtcgacgccaccatgcctatgggatctctgcagcctctggccacactgtacctgctgggaatgctggtggcttctgtgctggccgccgagaatctgtgggtcacagtgtactatggcgtgcccgtgtggaaagaggccaagaccacactgttctgcgcctccgatgccagagcctacgagaaagaggtgcacaacgtctgggccacacacgcctgtgtgcctaccgatccatctcctcaagagctggtgctgggcaacgtgaccgagaacttcaacatgtggaagaacgacatggtggaccagatgcacgaggacatcatcagcctgtgggaccagagcctgaagccttgcgtgaagctgacccctctgtgcgtgaccctgatctgttctgacgccaccgtgaaaaccggcaccgtggaagagatgaagaactgcagcttcaacaccaccaccgagatccgggacaagaagaagaaagagtacgccctgttctacaagcccgacatcgtgcccctgagcgagacaaacaacaccagcgagtaccggctgatcaactgcaacacctccgcctgcactcaggcctgtcctaaagtgaccttcgagcccattcctatccactactgtgcccctgccggctacgccatcctgaagtgcaacaacgagacattcaacggcacaggcccctgcagcaatgtgtccaccgtgcagtgtacccacggcatcagaccagtggtgtctacccagctgctgctgaatggaagcctggccgagaaagaaatcgtgatcagaagcgagaacctgaccaacaacgccaagatcatcatcgtccacctgaataccagcgtggaaatcgtgtgcacccggcctaacaacaacacccggaagtctgtgcggatcggccctggccagacattctatgccaccggcgatatcatcggcgacatcaagcaggcccactgcaacatcagcgaggaaaagtggaacgacaccctgcagaaagtgggcatcgagctgcagaagcacttccccaacaagaccatcaagtacaaccagagcgctggcggcgacatggaaatcaccacacacagcttcaattgtggcggcgagttcttctactgcaataccagcaacctgttcaacgggacctacaatggcacctacatcagcaccaacagcagcgccaactccaccagcaccatcactctgcagtgccggatcaagcagatcatcaatatgtggcaaggcgtcggccggtgtatgtacgcccctcctatcgccggcaacatcacctgtcggagcaatatcacaggcctgctgctcaccagagatggcggcaccaatagcaacgaaaccgaaaccttcagacctgccggcggagacatgagagacaattggagaagcgagctgtacaagtacaaggtggtcaagatcgagcccctgggcgtcgcacctacacggtgcaagagaagagtcgtgggccgtcgtagaaggcggagagccgttggaattggcgccgtgttcctgggctttctgggagccgctggatctacaatgggcgctgccagcatgaccctgacagtgcaggctagaaatctgctgagcggcatcgtgcagcagcagagcaatctgctcagagcccctgaggctcagcagcacctcctgaaactgacagtgtggggaatcaagcagctgcaggccagagtgctggcagtggaaagatacctgagggaccagcagctcctcggaatctggggctgttctggcaagctgatctgctgcaccaacgtgccctggaacagctcctggtccaacagaaacctgtccgagatctgggataacatgacctggctgcagtgggacaaagagatcagcaactacacccagatcatctacggcctgctggaagagagccagaaccagcaagagaaaaacgagcaggacctgctggccctggatggcggaggatctggcggaggcggttctggcggcggaggaagcggagatatcatcaagctgctgaacgagcaagtgaacaaagaaatgaactcctccaacctgtacatgagcatgagcagctggtgttacacccacagccttgatggcgccggactgttcctgtttgatcacgccgccgaggaatacgagcacgccaagaagctgatcatcttcctgaacgagaacaatgtgcccgtgcagctgaccagcattagcgccccagagcacaagttcgagggcctgacacagatctttcagaaggcctacgaacacgagcagcacatctccgagagcatcaacaacatcgtggaccacgccattaagtccaaggatcacgccaccttcaattttctgcagtggtacgtggccgaacagcacgaggaagaagtgctgttcaaggacatcctggacaagattgagctgatcggcaacgagaaccacggcctgtatctggccgaccagtacgtgaagggaatcgccaagagccggaagtcctgatgaggatcc

SEQ ID NO: 54 - DNA, 2487 bp, Artificial Sequence
  Description of Artificial Sequence: Synthetic polynucleotide
gtcgacgccaccatgcctatgggatctctgcagcctctggccacactgtacctgctgggaatgctggtggcttctgtgctggccgccgagaatctgtgggtcacagtgtactatggcgtgcccgtgtggaaagaggccaagaccacactgttctgcgcctccgatgccagagcctacgagaaagaggtgcacaacgtctgggccacacacgcctgtgtgcctaccgatccatctcctcaagagctggtgctgggcaacgtgaccgagaacttcaacatgtggaagaacgacatggtggaccagatgcacgaggacatcatcagcctgtgggaccagagcctgaagccttgcgtgaagctgacccctctgtgcgtgaccctgatctgttctgacgccaccgtgaaaaccggcaccgtggaagagatgaagaactgcagcttcaacaccaccaccgagatccgggacaagaagaagaaagagtacgccctgttctacaagcccgacatcgtgcccctgagcgagacaaacaacaccagcgagtaccggctgatcaactgcaacacctccgcctgcactcaggcctgtcctaaagtgaccttcgagcccattcctatccactactgtgcccctgccggctacgccatcctgaagtgcaacaacgagacattcaacggcacaggcccctgcagcaatgtgtccaccgtgcagtgtacccacggcatcagaccagtggtgtctacccagctgctgctgaatggaagcctggccgagaaagaaatcgtgatcagaagcgagaacctgaccaacaacgccaagatcatcatcgtccacctgaataccagcgtggaaatcgtgtgcacccggcctaacaacaacacccggaagtctgtgcggatcggccctggccagacattctatgccaccggcgatatcatcggcgacatcaagcaggcccactgcaacatcagcgaggaaaagtggaacgacaccctgcagaaagtgggcatcgagctgcagaagcacttccccaacaagaccatcaagtacaaccagagcgctggcggcgacatggaaatcaccacacacagcttcaattgtggcggcgagttcttctactgcaataccagcaacctgttcaacgggacctacaatggcacctacatcagcaccaacagcagcgccaactccaccagcaccatcactctgcagtgccggatcaagcagatcatcaatatgtggcaaggcgtcggccggtgtatgtacgcccctcctatcgccggcaacatcacctgtcggagcaatatcacaggcctgctgctcaccagagatggcggcaccaatagcaacgaaaccgaaaccttcagacctgccggcggagacatgagagacaattggagaagcgagctgtacaagtacaaggtggtcaagatcgagcccctgggcgtcgcacctacacggtgcaagagaagagtcgtgggccgtcgtagaaggcggagagccgttggaattggcgccgtgttcctgggctttctgggagccgctggatctacaatgggcgctgccagcatgaccctgacagtgcaggctagaaatctgctgagcggcatcgtgcagcagcagagcaatctgctcagagcccctgaggctcagcagcacctcctgaaactgacagtgtggggaatcaagcagctgcaggccagagtgctggcagtggaaagatacctgagggaccagcagctcctcggaatctggggctgttctggcaagctgatctgctgcaccaacgtgccctggaacagctcctggtccaacagaaacctgtccgagatctgggataacatgacctggctgcagtgggacaaagagatcagcaactacacccagatcatctacggcctgctggaagagagccagaaccagcaagagaaaaacgagcaggacctgctggccctggatggcggaggatctggcggaggcggttctggcgatatcatcaagctgctgaacgagcaagtgaacaaagaaatgaactcctccaacctgtacatgagcatgagcagctggtgttacacccacagccttgatggcgccggactgttcctgtttgatcacgccgccgaggaatacgagcacgccaagaagctgatcatcttcctgaacgagaacaatgtgcccgtgcagctgaccagcattagcgccccagagcacaagttcgagggcctgacacagatctttcagaaggcctacgaacacgagcagcacatctccgagagcatcaacaacatcgtggaccacgccattaagtccaaggatcacgccaccttcaattttctgcagtggtacgtggccgaacagcacgaggaagaagtgctgttcaaggacatcctggacaagattgagctgatcggcaacgagaaccacggcctgtatctggccgaccagtacgtgaagggaatcgccaagagccggaagtcctgatgaggatcc

SEQ ID NO: 55 - DNA, 2541 bp, Artificial Sequence
  Description of Artificial Sequence: Synthetic polynucleotide
gtcgacgccaccatgcctatgggatctctgcagcctctggccacactgtacctgctgggaatgctggtggcttctgtgctggccgccgagaatctgtgggtcacagtgtactatggcgtgcccgtgtggaaagaggccaagaccacactgttctgcgcctccgatgccagagcctacgagaaagaggtgcacaacgtctgggccacacacgcctgtgtgcctaccgatccatctcctcaagagctggtgctgggcaacgtgaccgagaacttcaacatgtggaagaacgacatggtggaccagatgcacgaggacatcatcagcctgtgggaccagagcctgaagccttgcgtgaagctgacccctctgtgcgtgaccctgatctgttctgacgccaccgtgaaaaccggcaccgtggaagagatgaagaactgcagcttcaacaccaccaccgagatccgggacaagaagaagaaagagtacgccctgttctacaagcccgacatcgtgcccctgagcgagacaaacaacaccagcgagtaccggctgatcaactgcaacacctccgcctgcactcaggcctgtcctaaagtgaccttcgagcccattcctatccactactgtgcccctgccggctacgccatcctgaagtgcaacaacgagacattcaacggcacaggcccctgcagcaatgtgtccaccgtgcagtgtacccacggcatcagaccagtggtgtctacccagctgctgctgaatggaagcctggccgagaaagaaatcgtgatcagaagcgagaacctgaccaacaacgccaagatcatcatcgtccacctgaataccagcgtggaaatcgtgtgcacccggcctaacaacaacacccggaagtctgtgcggatcggccctggccagacattctatgccaccggcgatatcatcggcgacatcaagcaggcccactgcaacatcagcgaggaaaagtggaacgacaccctgcagaaagtgggcatcgagctgcagaagcacttccccaacaagaccatcaagtacaaccagagcgctggcggcgacatggaaatcaccacacacagcttcaattgtggcggcgagttcttctactgcaataccagcaacctgttcaacgggacctacaatggcacctacatcagcaccaacagcagcgccaactccaccagcaccatcactctgcagtgccggatcaagcagatcatcaatatgtggcaaggcgtcggccggtgtatgtacgcccctcctatcgccggcaacatcacctgtcggagcaatatcacaggcctgctgctcaccagagatggcggcaccaatagcaacgaaaccgaaaccttcagacctgccggcggagacatgagagacaattggagaagcgagctgtacaagtacaaggtggtcaagatcgagcccctgggcgtcgcacctacacggtgcaagagaagagtcgtgggccgtcgtagaaggcggagagccgttggaattggcgccgtgttcctgggctttctgggagccgctggatctacaatgggcgctgccagcatgaccctgacagtgcaggctagaaatctgctgagcggcatcgtgcagcagcagagcaatctgctcagagcccctgaggctcagcagcacctcctgaaactgacagtgtggggaatcaagcagctgcaggccagagtgctggcagtggaaagatacctgagggaccagcagctcctcggaatctggggctgttctggcaagctgatctgctgcaccaacgtgccctggaacagctcctggtccaacagaaacctgtccgagatctgggataacatgacctggctgcagtgggacaaagagatcagcaactacacccagatcatctacggcctgctggaagagagccagaaccagcaagagaaaaacgagcaggacctgctggccctggatggcggaggatctggcggaggcggttctggcggcggaggaagcggaggcggaggctcaggtggtggcggatctggactgagcaaggatatcatcaagctgctgaacgagcaagtgaacaaagaaatgaactcctccaacctgtacatgagcatgagcagctggtgttacacccacagccttgatggcgccggactgttcctgtttgatcacgccgccgaggaatacgagcacgccaagaagctgatcatcttcctgaacgagaacaatgtgcccgtgcagctgaccagcattagcgccccagagcacaagttcgagggcctgacacagatctttcagaaggcctacgaacacgagcagcacatctccgagagcatcaacaacatcgtggaccacgccattaagtccaaggatcacgccaccttcaattttctgcagtggtacgtggccgaacagcacgaggaagaagtgctgttcaaggacatcctggacaagattgagctgatcggcaacgagaaccacggcctgtatctggccgaccagtacgtgaagggaatcgccaagagccggaagtcctgatgaggatcc

SEQ ID NO: 56 - DNA, 2526 bp, Artificial Sequence
  Description of Artificial Sequence: Synthetic polynucleotide
gtcgacgccaccatgcctatgggatctctgcagcctctggccacactgtacctgctgggaatgctggtggcttctgtgctggccgccgagaatctgtgggtcacagtgtactatggcgtgcccgtgtggaaagaggccaagaccacactgttctgcgcctccgatgccagagcctacgagaaagaggtgcacaacgtctgggccacacacgcctgtgtgcctaccgatccatctcctcaagagctggtgctgggcaacgtgaccgagaacttcaacatgtggaagaacgacatggtggaccagatgcacgaggacatcatcagcctgtgggaccagagcctgaagccttgcgtgaagctgacccctctgtgcgtgaccctgatctgttctgacgccaccgtgaaaaccggcaccgtggaagagatgaagaactgcagcttcaacaccaccaccgagatccgggacaagaagaagaaagagtacgccctgttctacaagcccgacatcgtgcccctgagcgagacaaacaacaccagcgagtaccggctgatcaactgcaacacctccgcctgcactcaggcctgtcctaaagtgaccttcgagcccattcctatccactactgtgcccctgccggctacgccatcctgaagtgcaacaacgagacattcaacggcacaggcccctgcagcaatgtgtccaccgtgcagtgtacccacggcatcagaccagtggtgtctacccagctgctgctgaatggaagcctggccgagaaagaaatcgtgatcagaagcgagaacctgaccaacaacgccaagatcatcatcgtccacctgaataccagcgtggaaatcgtgtgcacccggcctaacaacaacacccggaagtctgtgcggatcggccctggccagacattctatgccaccggcgatatcatcggcgacatcaagcaggcccactgcaacatcagcgaggaaaagtggaacgacaccctgcagaaagtgggcatcgagctgcagaagcacttccccaacaagaccatcaagtacaaccagagcgctggcggcgacatggaaatcaccacacacagcttcaattgtggcggcgagttcttctactgcaataccagcaacctgttcaacgggacctacaatggcacctacatcagcaccaacagcagcgccaactccaccagcaccatcactctgcagtgccggatcaagcagatcatcaatatgtggcaaggcgtcggccggtgtatgtacgcccctcctatcgccggcaacatcacctgtcggagcaatatcacaggcctgctgctcaccagagatggcggcaccaatagcaacgaaaccgaaaccttcagacctgccggcggagacatgagagacaattggagaagcgagctgtacaagtacaaggtggtcaagatcgagcccctgggcgtcgcacctacacggtgcaagagaagagtcgtgggccgtcgtagaaggcggagagccgttggaattggcgccgtgttcctgggctttctgggagccgctggatctacaatgggcgctgccagcatgaccctgacagtgcaggctagaaatctgctgagcggcatcgtgcagcagcagagcaatctgctcagagcccctgaggctcagcagcacctcctgaaactgacagtgtggggaatcaagcagctgcaggccagagtgctggcagtggaaagatacctgagggaccagcagctcctcggaatctggggctgttctggcaagctgatctgctgcaccaacgtgccctggaacagctcctggtccaacagaaacctgtccgagatctgggataacatgacctggctgcagtgggacaaagagatcagcaactacacccagatcatctacggcctgctggaagagagccagaaccagcaagagaaaaacgagcaggacctgctggccctggatggcggaggatctggcggaggcggttctggcggcggaggaagcggaggcggaggctcaggtctgagcaaggatatcatcaagctgctgaacgagcaagtgaacaaagaaatgaactcctccaacctgtacatgagcatgagcagctggtgttacacccacagccttgatggcgccggactgttcctgtttgatcacgccgccgaggaatacgagcacgccaagaagctgatcatcttcctgaacgagaacaatgtgcccgtgcagctgaccagcattagcgccccagagcacaagttcgagggcctgacacagatctttcagaaggcctacgaacacgagcagcacatctccgagagcatcaacaacatcgtggaccacgccattaagtccaaggatcacgccaccttcaattttctgcagtggtacgtggccgaacagcacgaggaagaagtgctgttcaaggacatcctggacaagattgagctgatcggcaacgagaaccacggcctgtatctggccgaccagtacgtgaagggaatcgccaagagccggaagtcctgatgaggatcc

SEQ ID NO: 57 - DNA, 2511 bp, Artificial Sequence
  Description of Artificial Sequence: Synthetic polynucleotide
gtcgacgccaccatgcctatgggatctctgcagcctctggccacactgtacctgctgggaatgctggtggcttctgtgctggccgccgagaatctgtgggtcacagtgtactatggcgtgcccgtgtggaaagaggccaagaccacactgttctgcgcctccgatgccagagcctacgagaaagaggtgcacaacgtctgggccacacacgcctgtgtgcctaccgatccatctcctcaagagctggtgctgggcaacgtgaccgagaacttcaacatgtggaagaacgacatggtggaccagatgcacgaggacatcatcagcctgtgggaccagagcctgaagccttgcgtgaagctgacccctctgtgcgtgaccctgatctgttctgacgccaccgtgaaaaccggcaccgtggaagagatgaagaactgcagcttcaacaccaccaccgagatccgggacaagaagaagaaagagtacgccctgttctacaagcccgacatcgtgcccctgagcgagacaaacaacaccagcgagtaccggctgatcaactgcaacacctccgcctgcactcaggcctgtcctaaagtgaccttcgagcccattcctatccactactgtgcccctgccggctacgccatcctgaagtgcaacaacgagacattcaacggcacaggcccctgcagcaatgtgtccaccgtgcagtgtacccacggcatcagaccagtggtgtctacccagctgctgctgaatggaagcctggccgagaaagaaatcgtgatcagaagcgagaacctgaccaacaacgccaagatcatcatcgtccacctgaataccagcgtggaaatcgtgtgcacccggcctaacaacaacacccggaagtctgtgcggatcggccctggccagacattctatgccaccggcgatatcatcggcgacatcaagcaggcccactgcaacatcagcgaggaaaagtggaacgacaccctgcagaaagtgggcatcgagctgcagaagcacttccccaacaagaccatcaagtacaaccagagcgctggcggcgacatggaaatcaccacacacagcttcaattgtggcggcgagttcttctactgcaataccagcaacctgttcaacgggacctacaatggcacctacatcagcaccaacagcagcgccaactccaccagcaccatcactctgcagtgccggatcaagcagatcatcaatatgtggcaaggcgtcggccggtgtatgtacgcccctcctatcgccggcaacatcacctgtcggagcaatatcacaggcctgctgctcaccagagatggcggcaccaatagcaacgaaaccgaaaccttcagacctgccggcggagacatgagagacaattggagaagcgagctgtacaagtacaaggtggtcaagatcgagcccctgggcgtcgcacctacacggtgcaagagaagagtcgtgggccgtcgtagaaggcggagagccgttggaattggcgccgtgttcctgggctttctgggagccgctggatctacaatgggcgctgccagcatgaccctgacagtgcaggctagaaatctgctgagcggcatcgtgcagcagcagagcaatctgctcagagcccctgaggctcagcagcacctcctgaaactgacagtgtggggaatcaagcagctgcaggccagagtgctggcagtggaaagatacctgagggaccagcagctcctcggaatctggggctgttctggcaagctgatctgctgcaccaacgtgccctggaacagctcctggtccaacagaaacctgtccgagatctgggataacatgacctggctgcagtgggacaaagagatcagcaactacacccagatcatctacggcctgctggaagagagccagaaccagcaagagaaaaacgagcaggacctgctggccctggatggcggaggatctggcggaggcggttctggcggcggaggaagcggactgagcaaggatatcatcaagctgctgaacgagcaagtgaacaaagaaatgaactcctccaacctgtacatgagcatgagcagctggtgttacacccacagccttgatggcgccggactgttcctgtttgatcacgccgccgaggaatacgagcacgccaagaagctgatcatcttcctgaacgagaacaatgtgcccgtgcagctgaccagcattagcgccccagagcacaagttcgagggcctgacacagatctttcagaaggcctacgaacacgagcagcacatctccgagagcatcaacaacatcgtggaccacgccattaagtccaaggatcacgccaccttcaattttctgcagtggtacgtggccgaacagcacgaggaagaagtgctgttcaaggacatcctggacaagattgagctgatcggcaacgagaaccacggcctgtatctggccgaccagtacgtgaagggaatcgccaagagccggaagtcctgatgaggatcc

SEQ ID NO: 58 - DNA, 2496 bp, Artificial Sequence
  Description of Artificial Sequence: Synthetic polynucleotide
gtcgacgccaccatgcctatgggatctctgcagcctctggccacactgtacctgctgggaatgctggtggcttctgtgctggccgccgagaatctgtgggtcacagtgtactatggcgtgcccgtgtggaaagaggccaagaccacactgttctgcgcctccgatgccagagcctacgagaaagaggtgcacaacgtctgggccacacacgcctgtgtgcctaccgatccatctcctcaagagctggtgctgggcaacgtgaccgagaacttcaacatgtggaagaacgacatggtggaccagatgcacgaggacatcatcagcctgtgggaccagagcctgaagccttgcgtgaagctgacccctctgtgcgtgaccctgatctgttctgacgccaccgtgaaaaccggcaccgtggaagagatgaagaactgcagcttcaacaccaccaccgagatccgggacaagaagaagaaagagtacgccctgttctacaagcccgacatcgtgcccctgagcgagacaaacaacaccagcgagtaccggctgatcaactgcaacacctccgcctgcactcaggcctgtcctaaagtgaccttcgagcccattcctatccactactgtgcccctgccggctacgccatcctgaagtgcaacaacgagacattcaacggcacaggcccctgcagcaatgtgtccaccgtgcagtgtacccacggcatcagaccagtggtgtctacccagctgctgctgaatggaagcctggccgagaaagaaatcgtgatcagaagcgagaacctgaccaacaacgccaagatcatcatcgtccacctgaataccagcgtggaaatcgtgtgcacccggcctaacaacaacacccggaagtctgtgcggatcggccctggccagacattctatgccaccggcgatatcatcggcgacatcaagcaggcccactgcaacatcagcgaggaaaagtggaacgacaccctgcagaaagtgggcatcgagctgcagaagcacttccccaacaagaccatcaagtacaaccagagcgctggcggcgacatggaaatcaccacacacagcttcaattgtggcggcgagttcttctactgcaataccagcaacctgttcaacgggacctacaatggcacctacatcagcaccaacagcagcgccaactccaccagcaccatcactctgcagtgccggatcaagcagatcatcaatatgtggcaaggcgtcggccggtgtatgtacgcccctcctatcgccggcaacatcacctgtcggagcaatatcacaggcctgctgctcaccagagatggcggcaccaatagcaacgaaaccgaaaccttcagacctgccggcggagacatgagagacaattggagaagcgagctgtacaagtacaaggtggtcaagatcgagcccctgggcgtcgcacctacacggtgcaagagaagagtcgtgggccgtcgtagaaggcggagagccgttggaattggcgccgtgttcctgggctttctgggagccgctggatctacaatgggcgctgccagcatgaccctgacagtgcaggctagaaatctgctgagcggcatcgtgcagcagcagagcaatctgctcagagcccctgaggctcagcagcacctcctgaaactgacagtgtggggaatcaagcagctgcaggccagagtgctggcagtggaaagatacctgagggaccagcagctcctcggaatctggggctgttctggcaagctgatctgctgcaccaacgtgccctggaacagctcctggtccaacagaaacctgtccgagatctgggataacatgacctggctgcagtgggacaaagagatcagcaactacacccagatcatctacggcctgctggaagagagccagaaccagcaagagaaaaacgagcaggacctgctggccctggatggcggaggatctggcggaggcggttctggcctgagcaaggatatcatcaagctgctgaacgagcaagtgaacaaagaaatgaactcctccaacctgtacatgagcatgagcagctggtgttacacccacagccttgatggcgccggactgttcctgtttgatcacgccgccgaggaatacgagcacgccaagaagctgatcatcttcctgaacgagaacaatgtgcccgtgcagctgaccagcattagcgccccagagcacaagttcgagggcctgacacagatctttcagaaggcctacgaacacgagcagcacatctccgagagcatcaacaacatcgtggaccacgccattaagtccaaggatcacgccaccttcaattttctgcagtggtacgtggccgaacagcacgaggaagaagtgctgttcaaggacatcctggacaagattgagctgatcggcaacgagaaccacggcctgtatctggccgaccagtacgtgaagggaatcgccaagagccggaagtcctgatgaggatcc

SEQ ID NO: 59 - DNA, 2481 bp, Artificial Sequence
  Description of Artificial Sequence: Synthetic polynucleotide
gtcgacgccaccatgcctatgggatctctgcagcctctggccacactgtacctgctgggaatgctggtggcttctgtgctggccgccgagaatctgtgggtcacagtgtactatggcgtgcccgtgtggaaagaggccaagaccacactgttctgcgcctccgatgccagagcctacgagaaagaggtgcacaacgtctgggccacacacgcctgtgtgcctaccgatccatctcctcaagagctggtgctgggcaacgtgaccgagaacttcaacatgtggaagaacgacatggtggaccagatgcacgaggacatcatcagcctgtgggaccagagcctgaagccttgcgtgaagctgacccctctgtgcgtgaccctgatctgttctgacgccaccgtgaaaaccggcaccgtggaagagatgaagaactgcagcttcaacaccaccaccgagatccgggacaagaagaagaaagagtacgccctgttctacaagcccgacatcgtgcccctgagcgagacaaacaacaccagcgagtaccggctgatcaactgcaacacctccgcctgcactcaggcctgtcctaaagtgaccttcgagcccattcctatccactactgtgcccctgccggctacgccatcctgaagtgcaacaacgagacattcaacggcacaggcccctgcagcaatgtgtccaccgtgcagtgtacccacggcatcagaccagtggtgtctacccagctgctgctgaatggaagcctggccgagaaagaaatcgtgatcagaagcgagaacctgaccaacaacgccaagatcatcatcgtccacctgaataccagcgtggaaatcgtgtgcacccggcctaacaacaacacccggaagtctgtgcggatcggccctggccagacattctatgccaccggcgatatcatcggcgacatcaagcaggcccactgcaacatcagcgaggaaaagtggaacgacaccctgcagaaagtgggcatcgagctgcagaagcacttccccaacaagaccatcaagtacaaccagagcgctggcggcgacatggaaatcaccacacacagcttcaattgtggcggcgagttcttctactgcaataccagcaacctgttcaacgggacctacaatggcacctacatcagcaccaacagcagcgccaactccaccagcaccatcactctgcagtgccggatcaagcagatcatcaatatgtggcaaggcgtcggccggtgtatgtacgcccctcctatcgccggcaacatcacctgtcggagcaatatcacaggcctgctgctcaccagagatggcggcaccaatagcaacgaaaccgaaaccttcagacctgccggcggagacatgagagacaattggagaagcgagctgtacaagtacaaggtggtcaagatcgagcccctgggcgtcgcacctacacggtgcaagagaagagtcgtgggccgtcgtagaaggcggagagccgttggaattggcgccgtgttcctgggctttctgggagccgctggatctacaatgggcgctgccagcatgaccctgacagtgcaggctagaaatctgctgagcggcatcgtgcagcagcagagcaatctgctcagagcccctgaggctcagcagcacctcctgaaactgacagtgtggggaatcaagcagctgcaggccagagtgctggcagtggaaagatacctgagggaccagcagctcctcggaatctggggctgttctggcaagctgatctgctgcaccaacgtgccctggaacagctcctggtccaacagaaacctgtccgagatctgggataacatgacctggctgcagtgggacaaagagatcagcaactacacccagatcatctacggcctgctggaagagagccagaaccagcaagagaaaaacgagcaggacctgctggccctggatggcggaggatctggcctgagcaaggatatcatcaagctgctgaacgagcaagtgaacaaagaaatgaactcctccaacctgtacatgagcatgagcagctggtgttacacccacagccttgatggcgccggactgttcctgtttgatcacgccgccgaggaatacgagcacgccaagaagctgatcatcttcctgaacgagaacaatgtgcccgtgcagctgaccagcattagcgccccagagcacaagttcgagggcctgacacagatctttcagaaggcctacgaacacgagcagcacatctccgagagcatcaacaacatcgtggaccacgccattaagtccaaggatcacgccaccttcaattttctgcagtggtacgtggccgaacagcacgaggaagaagtgctgttcaaggacatcctggacaagattgagctgatcggcaacgagaaccacggcctgtatctggccgaccagtacgtgaagggaatcgccaagagccggaagtcctgatgaggatcc

SEQ ID NO: 60 - protein, 836 aa, Artificial Sequence
  Description of Artificial Sequence: Synthetic polypeptide
MPMGSLQPLATLYLLGMLVASVLAAENLWVTVYYGVPVWKEAKTTLFCASDARAYEKEVHNVWATHACVPTDPSPQELVLGNVTENFNMWKNDMVDQMHEDIISLWDQSLKPCVKLTPLCVTLICSDATVKTGTVEEMKNCSFNTTTEIRDKKKKEYALFYKPDIVPLSETNNTSEYRLINCNTSACTQACPKVTFEPIPIHYCAPAGYAILKCNNETFNGTGPCSNVSTVQCTHGIRPVVSTQLLLNGSLAEKEIVIRSENLTNNAKIIIVHLNTSVEIVCTRPNNNTRKSVRIGPGQTFYATGDIIGDIKQAHCNISEEKWNDTLQKVGIELQKHFPNKTIKYNQSAGGDMEITTHSFNCGGEFFYCNTSNLFNGTYNGTYISTNSSANSTSTITLQCRIKQIINMWQGVGRCMYAPPIAGNITCRSNITGLLLTRDGGTNSNETETFRPAGGDMRDNWRSELYKYKVVKIEPLGVAPTRCKRRVVGRRRRRRAVGIGAVFLGFLGAAGSTMGAASMTLTVQARNLLSGIVQQQSNLLRAPEAQQHLLKLTVWGIKQLQARVLAVERYLRDQQLLGIWGCSGKLICCTNVPWNSSWSNRNLSEIWDNMTWLQWDKEISNYTQIIYGLLEESQNQQEKNEQDLLALDGGGSGGGGSGGGGSGGGGSGGGGSGDIIKLLNEQVNKEMNSSNLYMSMSSWCYTHSLDGAGLFLFDHAAEEYEHAKKLIIFLNENNVPVQLTSISAPEHKFEGLTQIFQKAYEHEQHISESINNIVDHAIKSKDHATFNFLQWYVAEQHEEEVLFKDILDKIELIGNENHGLYLADQYVKGIAKSRKS

SEQ ID NO: 61 - protein, 831 aa, Artificial Sequence
  Description of Artificial Sequence: Synthetic polypeptide
MPMGSLQPLATLYLLGMLVASVLAAENLWVTVYYGVPVWKEAKTTLFCASDARAYEKEVHNVWATHACVPTDPSPQELVLGNVTENFNMWKNDMVDQMHEDIISLWDQSLKPCVKLTPLCVTLICSDATVKTGTVEEMKNCSFNTTTEIRDKKKKEYALFYKPDIVPLSETNNTSEYRLINCNTSACTQACPKVTFEPIPIHYCAPAGYAILKCNNETFNGTGPCSNVSTVQCTHGIRPVVSTQLLLNGSLAEKEIVIRSENLTNNAKIIIVHLNTSVEIVCTRPNNNTRKSVRIGPGQTFYATGDIIGDIKQAHCNISEEKWNDTLQKVGIELQKHFPNKTIKYNQSAGGDMEITTHSFNCGGEFFYCNTSNLFNGTYNGTYISTNSSANSTSTITLQCRIKQIINMWQGVGRCMYAPPIAGNITCRSNITGLLLTRDGGTNSNETETFRPAGGDMRDNWRSELYKYKVVKIEPLGVAPTRCKRRVVGRRRRRRAVGIGAVFLGFLGAAGSTMGAASMTLTVQARNLLSGIVQQQSNLLRAPEAQQHLLKLTVWGIKQLQARVLAVERYLRDQQLLGIWGCSGKLICCTNVPWNSSWSNRNLSEIWDNMTWLQWDKEISNYTQIIYGLLEESQNQQEKNEQDLLALDGGGSGGGGSGGGGSGGGGSGDIIKLLNEQVNKEMNSSNLYMSMSSWCYTHSLDGAGLFLFDHAAEEYEHAKKLIIFLNENNVPVQLTSISAPEHKFEGLTQIFQKAYEHEQHISESINNIVDHAIKSKDHATFNFLQWYVAEQHEEEVLFKDILDKIELIGNENHGLYLADQYVKGIAKSRKS

SEQ ID NO: 62 - protein, 826 aa, Artificial Sequence
  Description of Artificial Sequence: Synthetic polypeptide
MPMGSLQPLATLYLLGMLVASVLAAENLWVTVYYGVPVWKEAKTTLFCASDARAYEKEVHNVWATHACVPTDPSPQELVLGNVTENFNMWKNDMVDQMHEDIISLWDQSLKPCVKLTPLCVTLICSDATVKTGTVEEMKNCSFNTTTEIRDKKKKEYALFYKPDIVPLSETNNTSEYRLINCNTSACTQACPKVTFEPIPIHYCAPAGYAILKCNNETFNGTGPCSNVSTVQCTHGIRPVVSTQLLLNGSLAEKEIVIRSENLTNNAKIIIVHLNTSVEIVCTRPNNNTRKSVRIGPGQTFYATGDIIGDIKQAHCNISEEKWNDTLQKVGIELQKHFPNKTIKYNQSAGGDMEITTHSFNCGGEFFYCNTSNLFNGTYNGTYISTNSSANSTSTITLQCRIKQIINMWQGVGRCMYAPPIAGNITCRSNITGLLLTRDGGTNSNETETFRPAGGDMRDNWRSELYKYKVVKIEPLGVAPTRCKRRVVGRRRRRRAVGIGAVFLGFLGAAGSTMGAASMTLTVQARNLLSGIVQQQSNLLRAPEAQQHLLKLTVWGIKQLQARVLAVERYLRDQQLLGIWGCSGKLICCTNVPWNSSWSNRNLSEIWDNMTWLQWDKEISNYTQIIYGLLEESQNQQEKNEQDLLALDGGGSGGGGSGGGGSGDIIKLLNEQVNKEMNSSNLYMSMSSWCYTHSLDGAGLFLFDHAAEEYEHAKKLIIFLNENNVPVQLTSISAPEHKFEGLTQIFQKAYEHEQHISESINNIVDHAIKSKDHATFNFLQWYVAEQHEEEVLFKDILDKIELIGNENHGLYLADQYVKGIAKSRKS

SEQ ID NO: 63 - protein, 821 aa, Artificial Sequence
  Description of Artificial Sequence: Synthetic polypeptide
MPMGSLQPLATLYLLGMLVASVLAAENLWVTVYYGVPVWKEAKTTLFCASDARAYEKEVHNVWATHACVPTDPSPQELVLGNVTENFNMWKNDMVDQMHEDIISLWDQSLKPCVKLTPLCVTLICSDATVKTGTVEEMKNCSFNTTTEIRDKKKKEYALFYKPDIVPLSETNNTSEYRLINCNTSACTQACPKVTFEPIPIHYCAPAGYAILKCNNETFNGTGPCSNVSTVQCTHGIRPVVSTQLLLNGSLAEKEIVIRSENLTNNAKIIIVHLNTSVEIVCTRPNNNTRKSVRIGPGQTFYATGDIIGDIKQAHCNISEEKWNDTLQKVGIELQKHFPNKTIKYNQSAGGDMEITTHSFNCGGEFFYCNTSNLFNGTYNGTYISTNSSANSTSTITLQCRIKQIINMWQGVGRCMYAPPIAGNITCRSNITGLLLTRDGGTNSNETETFRPAGGDMRDNWRSELYKYKVVKIEPLGVAPTRCKRRVVGRRRRRRAVGIGAVFLGFLGAAGSTMGAASMTLTVQARNLLSGIVQQQSNLLRAPEAQQHLLKLTVWGIKQLQARVLAVERYLRDQQLLGIWGCSGKLICCTNVPWNSSWSNRNLSEIWDNMTWLQWDKEISNYTQIIYGLLEESQNQQEKNEQDLLALDGGGSGGGGSGDIIKLLNEQVNKEMNSSNLYMSMSSWCYTHSLDGAGLFLFDHAAEEYEHAKKLIIFLNENNVPVQLTSISAPEHKFEGLTQIFQKAYEHEQHISESINNIVDHAIKSKDHATFNFLQWYVAEQHEEEVLFKDILDKIELIGNENHGLYLADQYVKGIAKSRKS

SEQ ID NO: 64 - protein, 839 aa, Artificial Sequence
  Description of Artificial Sequence: Synthetic polypeptide
MPMGSLQPLATLYLLGMLVASVLAAENLWVTVYYGVPVWKEAKTTLFCASDARAYEKEVHNVWATHACVPTDPSPQELVLGNVTENFNMWKNDMVDQMHEDIISLWDQSLKPCVKLTPLCVTLICSDATVKTGTVEEMKNCSFNTTTEIRDKKKKEYALFYKPDIVPLSETNNTSEYRLINCNTSACTQACPKVTFEPIPIHYCAPAGYAILKCNNETFNGTGPCSNVSTVQCTHGIRPVVSTQLLLNGSLAEKEIVIRSENLTNNAKIIIVHLNTSVEIVCTRPNNNTRKSVRIGPGQTFYATGDIIGDIKQAHCNISEEKWNDTLQKVGIELQKHFPNKTIKYNQSAGGDMEITTHSFNCGGEFFYCNTSNLFNGTYNGTYISTNSSANSTSTITLQCRIKQIINMWQGVGRCMYAPPIAGNITCRSNITGLLLTRDGGTNSNETETFRPAGGDMRDNWRSELYKYKVVKIEPLGVAPTRCKRRVVGRRRRRRAVGIGAVFLGFLGAAGSTMGAASMTLTVQARNLLSGIVQQQSNLLRAPEAQQHLLKLTVWGIKQLQARVLAVERYLRDQQLLGIWGCSGKLICCTNVPWNSSWSNRNLSEIWDNMTWLQWDKEISNYTQIIYGLLEESQNQQEKNEQDLLALDGGGSGGGGSGGGGSGGGGSGGGGSGLSKDIIKLLNEQVNKEMNSSNLYMSMSSWCYTHSLDGAGLFLFDHAAEEYEHAKKLIIFLNENNVPVQLTSISAPEHKFEGLTQIFQKAYEHEQHISESINNIVDHAIKSKDHATFNFLQWYVAEQHEEEVLFKDILDKIELIGNENHGLYLADQYVKGIAKSRKS

SEQ ID NO: 65 - protein, 834 aa, Artificial Sequence
  Description of Artificial Sequence: Synthetic polypeptide
MPMGSLQPLATLYLLGMLVASVLAAENLWVTVYYGVPVWKEAKTTLFCASDARAYEKEVHNVWATHACVPTDPSPQELVLGNVTENFNMWKNDMVDQMHEDIISLWDQSLKPCVKLTPLCVTLICSDATVKTGTVEEMKNCSFNTTTEIRDKKKKEYALFYKPDIVPLSETNNTSEYRLINCNTSACTQACPKVTFEPIPIHYCAPAGYAILKCNNETFNGTGPCSNVSTVQCTHGIRPVVSTQLLLNGSLAEKEIVIRSENLTNNAKIIIVHLNTSVEIVCTRPNNNTRKSVRIGPGQTFYATGDIIGDIKQAHCNISEEKWNDTLQKVGIELQKHFPNKTIKYNQSAGGDMEITTHSFNCGGEFFYCNTSNLFNGTYNGTYISTNSSANSTSTITLQCRIKQIINMWQGVGRCMYAPPIAGNITCRSNITGLLLTRDGGTNSNETETFRPAGGDMRDNWRSELYKYKVVKIEPLGVAPTRCKRRVVGRRRRRRAVGIGAVFLGFLGAAGSTMGAASMTLTVQARNLLSGIVQQQSNLLRAPEAQQHLLKLTVWGIKQLQARVLAVERYLRDQQLLGIWGCSGKLICCTNVPWNSSWSNRNLSEIWDNMTWLQWDKEISNYTQIIYGLLEESQNQQEKNEQDLLALDGGGSGGGGSGGGGSGGGGSGLSKDIIKLLNEQVNKEMNSSNLYMSMSSWCYTHSLDGAGLFLFDHAAEEYEHAKKLIIFLNENNVPVQLTSISAPEHKFEGLTQIFQKAYEHEQHISESINNIVDHAIKSKDHATFNFLQWYVAEQHEEEVLFKDILDKIELIGNENHGLYLADQYVKGIAKSRKS

SEQ ID NO: 66 - protein, 829 aa, Artificial Sequence
  Description of Artificial Sequence: Synthetic polypeptide
MPMGSLQPLATLYLLGMLVASVLAAENLWVTVYYGVPVWKEAKTTLFCASDARAYEKEVHNVWATHACVPTDPSPQELVLGNVTENFNMWKNDMVDQMHEDIISLWDQSLKPCVKLTPLCVTLICSDATVKTGTVEEMKNCSFNTTTEIRDKKKKEYALFYKPDIVPLSETNNTSEYRLINCNTSACTQACPKVTFEPIPIHYCAPAGYAILKCNNETFNGTGPCSNVSTVQCTHGIRPVVSTQLLLNGSLAEKEIVIRSENLTNNAKIIIVHLNTSVEIVCTRPNNNTRKSVRIGPGQTFYATGDIIGDIKQAHCNISEEKWNDTLQKVGIELQKHFPNKTIKYNQSAGGDMEITTHSFNCGGEFFYCNTSNLFNGTYNGTYISTNSSANSTSTITLQCRIKQIINMWQGVGRCMYAPPIAGNITCRSNITGLLLTRDGGTNSNETETFRPAGGDMRDNWRSELYKYKVVKIEPLGVAPTRCKRRVVGRRRRRRAVGIGAVFLGFLGAAGSTMGAASMTLTVQARNLLSGIVQQQSNLLRAPEAQQHLLKLTVWGIKQLQARVLAVERYLRDQQLLGIWGCSGKLICCTNVPWNSSWSNRNLSEIWDNMTWLQWDKEISNYTQIIYGLLEESQNQQEKNEQDLLALDGGGSGGGGSGGGGSGLSKDIIKLLNEQVNKEMNSSNLYMSMSSWCYTHSLDGAGLFLFDHAAEEYEHAKKLIIFLNENNVPVQLTSISAPEHKFEGLTQIFQKAYEHEQHISESINNIVDHAIKSKDHATFNFLQWYVAEQHEEEVLFKDILDKIELIGNENHGLYLADQYVKGIAKSRKS

SEQ ID NO: 67 - protein, 824 aa, Artificial Sequence
  Description of Artificial Sequence: Synthetic polypeptide
MPMGSLQPLATLYLLGMLVASVLAAENLWVTVYYGVPVWKEAKTTLFCASDARAYEKEVHNVWATHACVPTDPSPQELVLGNVTENFNMWKNDMVDQMHEDIISLWDQSLKPCVKLTPLCVTLICSDATVKTGTVEEMKNCSFNTTTEIRDKKKKEYALFYKPDIVPLSETNNTSEYRLINCNTSACTQACPKVTFEPIPIHYCAPAGYAILKCNNETFNGTGPCSNVSTVQCTHGIRPVVSTQLLLNGSLAEKEIVIRSENLTNNAKIIIVHLNTSVEIVCTRPNNNTRKSVRIGPGQTFYATGDIIGDIKQAHCNISEEKWNDTLQKVGIELQKHFPNKTIKYNQSAGGDMEITTHSFNCGGEFFYCNTSNLFNGTYNGTYISTNSSANSTSTITLQCRIKQIINMWQGVGRCMYAPPIAGNITCRSNITGLLLTRDGGTNSNETETFRPAGGDMRDNWRSELYKYKVVKIEPLGVAPTRCKRRVVGRRRRRRAVGIGAVFLGFLGAAGSTMGAASMTLTVQARNLLSGIVQQQSNLLRAPEAQQHLLKLTVWGIKQLQARVLAVERYLRDQQLLGIWGCSGKLICCTNVPWNSSWSNRNLSEIWDNMTWLQWDKEISNYTQIIYGLLEESQNQQEKNEQDLLALDGGGSGGGGSGLSKDIIKLLNEQVNKEMNSSNLYMSMSSWCYTHSLDGAGLFLFDHAAEEYEHAKKLIIFLNENNVPVQLTSISAPEHKFEGLTQIFQKAYEHEQHISESINNIVDHAIKSKDHATFNFLQWYVAEQHEEEVLFKDILDKIELIGNENHGLYLADQYVKGIAKSRKS

SEQ ID NO: 68 - protein, 819 aa, Artificial Sequence
  Description of Artificial Sequence: Synthetic polypeptide
MPMGSLQPLATLYLLGMLVASVLAAENLWVTVYYGVPVWKEAKTTLFCASDARAYEKEVHNVWATHACVPTDPSPQELVLGNVTENFNMWKNDMVDQMHEDIISLWDQSLKPCVKLTPLCVTLICSDATVKTGTVEEMKNCSFNTTTEIRDKKKKEYALFYKPDIVPLSETNNTSEYRLINCNTSACTQACPKVTFEPIPIHYCAPAGYAILKCNNETFNGTGPCSNVSTVQCTHGIRPVVSTQLLLNGSLAEKEIVIRSENLTNNAKIIIVHLNTSVEIVCTRPNNNTRKSVRIGPGQTFYATGDIIGDIKQAHCNISEEKWNDTLQKVGIELQKHFPNKTIKYNQSAGGDMEITTHSFNCGGEFFYCNTSNLFNGTYNGTYISTNSSANSTSTITLQCRIKQIINMWQGVGRCMYAPPIAGNITCRSNITGLLLTRDGGTNSNETETFRPAGGDMRDNWRSELYKYKVVKIEPLGVAPTRCKRRVVGRRRRRRAVGIGAVFLGFLGAAGSTMGAASMTLTVQARNLLSGIVQQQSNLLRAPEAQQHLLKLTVWGIKQLQARVLAVERYLRDQQLLGIWGCSGKLICCTNVPWNSSWSNRNLSEIWDNMTWLQWDKEISNYTQIIYGLLEESQNQQEKNEQDLLALDGGGSGLSKDIIKLLNEQVNKEMNSSNLYMSMSSWCYTHSLDGAGLFLFDHAAEEYEHAKKLIIFLNENNVPVQLTSISAPEHKFEGLTQIFQKAYEHEQHISESINNIVDHAIKSKDHATFNFLQWYVAEQHEEEVLFKDILDKIELIGNENHGLYLADQYVKGIAKSRKS

SEQ ID NO: 69 - DNA, 2475 bp, Artificial Sequence
  Description of Artificial Sequence: Synthetic polynucleotide
gtcgacgccaccatgcctatgggatctctgcagcctctggccacactgtacctgctgggaatgctggtggcttctgtgctggccgccgagaatctgtgggtcacagtgtactatggcgtgcccgtgtggaaagaggccaagaccacactgttctgtgccagcgacgccaaggcctacaagaaagaggtgcacaacatctgggccacacacgcctgcgtgccaaccgatccatctcctcaagagctgttcctggaaaacgtgaccgagaacttcaacatgtggaagaacgacatggtggaccagatgcacgaggacatcatcagcctgtgggaccagagcctgaagccttgcgtgaagctgacccctctgtgcgtgaccctgatctgtagcaccgccaccgtgaacaacagagccgtggacgagatgaagaactgcagcttcaacaccaccaccgagatccgggacaagaagaagaaagagtacgccctgttctatcggagcgacgtggtgcccctggacgagacaaacaacaccagcgagtaccggctgatcaactgcaacacctccgccatcaccatggtctgccccaagctgaccttcgagcccattcctatccactactgtgcccctgccggctacgccatcctgaagtgcaacgacgagacattcaacggcacaggcccctgcagcaatgtgtccaccgtgcagtgtacccacggcatcagacctgtgctgagcacacagctgctgctgaatggaagcctggccgagaaagaaatcgtgatcagaagcgagaacctgaccaacaacgccaagatcatcattgtgcatctgcacacccctgtggaaatcgtgtgcacccggcctctgaatctgaccagaaagagcgtgcggatcggccctggccagaccttttatgccatgggcgacatcatcggcgatatcaagcaggcccactgcaacatcagcgaggaaaagtggaacgagacactgcagaaagtgggcatcgagctgcagaagcacttccccaacaagaccatcaagtacaaccagagcgctggcggcgacatggaaatcaccacacacagcttcaattgtggcggcgagttcttctactgcaataccagcaagctgttcaacagcacctacaacggcacctatatcagcaccaactccaccaatagcaccagctacatcaccctgcagtgccggatcaagatgatcattaacatgtggcaaggcgtcggcagggctatgtacgcccctcctatcgccggcaacatcacctgtcggagcaatatcacaggcctgctgctcaccagagatggcggcatcaacaacgtgtccaacgagacagaaaccttccggcctgccggcggagacatgagagacaattggagaagcgagctgtacaagtacaaggtggtcaagatcgagcccctgggcgtcgcaccaacacggtgcaagagaagagtcgtgggccgtcgtagaaggcggagagccgttggaattggcgccgtgttcctgggctttctgggagccgctggatctacaatgggcgctgccagcatgaccctgacagtgcaggctagaaatctgctgagcggcatcgtgcagcagcagagcaatctgctcagagcccctgaggctcagcagcacctcctgaaactgacagtgtggggcatcaagcagctgcaggcaagagtgctggcagtggaaagatacctgcgggaccagcagctcctcggaatctggggatgtagcggcaagctgatctgctgcaccaacgtgccctggaacagcagctggtccaaccggaatctgagcgagatctgggataacatgacctggctgcagtgggacaaagagatcagcaactacacccagatcatctacggcctgctggaagagagccagaaccagcaagagaaaaacgagcaggacctgctggcccttgatggtggtggaagcggagatatcatcaagctgctgaacgagcaagtgaacaaagaaatgaacagctccaacctgtacatgagcatgtccagctggtgttacacccacagcctggatggcgccggactgttcctgtttgatcacgccgccgaggaatacgagcacgccaagaagctgatcattttcctgaacgagaacaacgtgccagtgcagctgaccagcatctctgcccctgagcacaagttcgagggcctgacacagatctttcagaaggcctacgaacacgagcagcacatctccgagtccatcaacaatatcgtggaccacgccatcaagagcaaggatcacgccaccttcaactttctccagtggtacgtggccgaacagcacgaggaagaagtgctgttcaaggacatcctggacaagattgagctgatcggcaacgagaaccacggcctgtatctggccgaccagtacgtgaagggaatcgccaagagccggaagtcctgatgaggatcc

SEQ ID NO: 70 - DNA, 2475 bp, Artificial Sequence
  Description of Artificial Sequence: Synthetic polynucleotide
gtcgacgccaccatgcccatgggatctctgcaacctctggccacactgtacctgctgggaatgctggtggcttctgtgctggccgccgagaatctgtgggtcacagtgtactatggcgtgcccgtgtggaaagaggccaagaccacactgttctgtgccagcgacgccaaggcctacaagaaagaggtgcacaacgtctgggccacacacgcctgtgtgcctaccgatccatctcctcaagagctgttcctggaaaacgtgaccgagaacttcaacatgtggaagaacgacatggtggaccagatgcacgaggacatcatcagcctgtgggaccagagcctgaagccttgcgtgaagctgacccctctgtgcgtgaccctgatctgtagcaccgccaccgtgaacaacagagccgtggacgagatgaagaactgcagcttcaacaccaccaccgagatccgggacaagaagaagaaagagtacgccctgttctatcggagcgacgtggtgcccctggacgagacaaacaacaccagcgagtaccggctgatcaactgcaacacctccgcctgcactcaggcctgtcctaaagtgaccttcgagcccattcctatccactactgtgcccctgccggctacgccatcctgaagtgcaacgacgagacattcaacggcacaggcccctgcagcaatgtgtccaccgtgcagtgtacccacggcatcagaccagtggtgtctacccagctgctgctgaatggaagcctggccgagaaagaaatcgtgatcagaagcgagaacctgaccaacaacgccaagatcatcattgtgcatctgcacacccctgtggaaatcgtgtgcacccggcctaacaacaacacccggaagtctgtgcggatcggccctggccagacattctatgccaccggcgatatcatcggcgacatcaagcaggcccactgcaacatcagcgaggaaaagtggaacgagacactgcagaaagtgggcatcgagctgcagaagcacttccccaacaagaccatcaagtacaaccagagcgctggcggcgacatggaaatcaccacacacagcttcaattgtggcggcgagttcttctactgcaataccagcaagctgttcaacagcacctacaacggcacctatatcagcaccaactccaccaatagcaccagctacatcaccctgcagtgccggatcaagcagatcatcaatatgtggcaaggcgtcggccggtgtatgtacgcccctcctatcgccggcaacatcacctgtcggagcaatatcacaggcctgctgctcaccagagatggcggcatcaacaacgtgtccaacgagacagaaaccttccggcctgccggcggagacatgagagacaattggagaagcgagctgtacaagtacaaggtggtcaagatcgagcccctgggcgtcgcaccaacacggtgcaagagaagagtcgtgggccgtcgtagaaggcggagagccgttggaattggcgccgtgttcctgggctttctgggagccgctggatctacaatgggcgctgccagcatgaccctgacagtgcaggctagaaatctgctgagcggcatcgtgcagcagcagagcaatctgctcagagcccctgaggctcagcagcacctcctgaaactgacagtgtggggaatcaagcagctgcaggccagagtgctggcagtggaaagatacctgagggaccagcagctcctcggaatctggggatgtagcggcaagctgatctgctgcaccaacgtgccctggaactccagctggtccaaccggaatctgagcgagatctgggataacatgacctggctgcagtgggacaaagagatcagcaactacacccagatcatctacggcctgctggaagagagccagaaccagcaagagaaaaacgagcaggacctgctggccctggacggcggaggatctggcgacattatcaagctgctgaacgagcaagtgaacaaagagatgaacagctccaacctgtacatgagcatgagcagctggtgttacacccacagccttgatggcgccggactgttcctgtttgatcacgccgccgaggaatacgagcacgccaagaagctgatcatcttcctgaacgagaacaatgtgcccgtgcagctgaccagcattagcgccccagagcacaagttcgagggcctgacacagatctttcagaaggcctacgaacacgagcagcacatctccgagagcatcaacaacatcgtggaccacgccattaagagcaaggatcacgccaccttcaattttctgcagtggtacgtggccgaacagcacgaggaagaagtgctgttcaaggacatcctggacaagattgagctgatcggcaacgagaaccacggcctgtatctggccgaccagtacgtgaagggaatcgccaagagccggaagtcctgataaggatcc

SEQ ID NO: 71 - DNA, 2562 bp, Artificial Sequence
  Description of Artificial Sequence: Synthetic polynucleotide
gtcgacgccaccatgcctatgggatctctgcagcctctggccacactgtacctgctgggaatgctggtggcttctgtgctggccgagggcaatctgtgggtcacagtgtactatggcgtgcccgtgtggaaagaggccaagaccacactgttctgtgccagcgacgccaaggcctacaagaaagaggtggccaacgtctgggccacacacgcctgtgttcctaccgatccatctcctcaagagctgttcctggaaaacgtgaccgagaacttcaacatgtggaagaacgacatggtggaccagatgcacgaggacatcatcagcctgtgggaccagagcctgaagccttgcgtgaagctgacccctctgtgcgtgaccctgatctgtagcaccgccaccgtgaacaacagagccgtggacgagatgaagaactgcagcttcaacaccaccaccgagatccgggacaagaagaagaaagagtacgccctgttctatcggagcgacgtggtgcccctggacgagacaaacaacaccagcgagtaccggctgatcaactgcaacacctccgccgtgacacaggcttgccccaaagtgaccttcgagcccattcctatccactactgtgcccctgccggctacgccatcctgaagtgcaacgacgagacattcaacggcacaggcccctgcagcaatgtgtccaccgtgcagtgtacccacggcatcagaccagtggtgtctacccagctgctgctgaatggaagcctggccgagaaagaaatcgtgatcagaagcgagaacctgaccaacaacgccaagatcatcattgtgcatctgcacacccctgtggaaatcgtgtgcacccggcctaacaacaacacccggaagtctgtgcggatcggccctggccagacattctatgccaccggcgatatcatcggcgacatcaagcaggcccactgcaacatcagcgaggaaaagtggaacgagacactgcagaaagtgggcatcgagctgcagaagcacttccccaacaagaccatcaagtacaaccagagcgctggcggcgacatggaaatcaccacacacagcttcaattgtggcggcgagttcttctactgcaataccagcaagctgttcaacagcacctacaacggcacctatatcagcaccaactccaccaatagcaccagctacatcaccctgcagtgccggatcaagcagatcatcaatatgtggcaaggcgtgggcagagctatgtacgcccctcctatcgccggcaacatcacctgtcggagcaatatcacaggcctgctgctcaccagagatggcggcatcaacaacgtgtccaacgagacagaaaccttccggcctgccggcggagacatgagagacaattggagaagcgagctgtacaagtacaaggtggtggaagtgcagcccctgggaatcgctccaacaggcgctaagagaagagtggtggaacgcgagaaaagagccgctggactgggagccctgtttctgggttttctgggagccgccggaagcacaatgggagctgcctctatcacactgaccgtgcaggctagacagctgctgagcggaattgtgcagcagcagagcaacctgctgagagccattgaagcccagcagcacatgctgcagctgaccgtgtggggaatcaaacagctgcaggccagagtgctgaccctggaaagatacgccaaggaccagcagctcctcggcatgtggggatgttctggcaagctgatctgcaccaccaacgtgccctggaacacctcctggtccaacaagagcgagatggacatctggaacaacatgacctggatgcagtgggagagagagatcagcaactacaccgagacaatctacatgctgctcgaggacagccagcggcagcaagagagaaacgagaaggatctgctggccctggactcctggaatagcctgtggaactggttcaatatcaccaactggctgtggtacatcaagatcttcatcatgatcgtcggcggcctgatcggcctgagaatcgtgtttgccgtgctgagcatcgtgaacagagtgcggcagggaatcagcccactgagcctgcaaaccctgacacctaatcctagagagcccgaccggctgagaggcatcgaagaagaaggcggcgagcaggacagagacagatccatcagactggtgtccggcttcctgcctatcgtgtgggacgatctgagaagcctgtgcctgttcagctaccaccggctgcgggattttctgctgcttgccgccagagtggttgaactgctgggacacagctctctgcggggactgcaaagaggctgggaagtcctgaagtacctgggcagcctggtgcagtattggggcctcgagctgaagagaagcgccattagcctgttcgacaccctggccattgctgtggccgaaggcaccgacagaatcattgagctgatccagggcttctgccgggccatcagaaacatccctaccagaatccggcagggcttcgaggcttccctgctgtgataaggatcc

SEQ ID NO: 72 - protein, 655 aa, Artificial Sequence; identical to SEQ ID NO: 27
  Description of Artificial Sequence: Synthetic polypeptide

SEQ ID NO: 73 - protein, 817 aa, Artificial Sequence
  Description of Artificial Sequence: Synthetic polypeptide
MPMGSLQPLATLYLLGMLVASVLAAENLWVTVYYGVPVWKEAKTTLFCASDAKAYKKEVHNIWATHACVPTDPSPQELFLENVTENFNMWKNDMVDQMHEDIISLWDQSLKPCVKLTPLCVTLICSTATVNNRAVDEMKNCSFNTTTEIRDKKKKEYALFYRSDVVPLDETNNTSEYRLINCNTSAITMVCPKLTFEPIPIHYCAPAGYAILKCNDETFNGTGPCSNVSTVQCTHGIRPVLSTQLLLNGSLAEKEIVIRSENLTNNAKIIIVHLHTPVEIVCTRPLNLTRKSVRIGPGQTFYAMGDIIGDIKQAHCNISEEKWNETLQKVGIELQKHFPNKTIKYNQSAGGDMEITTHSFNCGGEFFYCNTSKLFNSTYNGTYISTNSTNSTSYITLQCRIKMIINMWQGVGRAMYAPPIAGNITCRSNITGLLLTRDGGINNVSNETETFRPAGGDMRDNWRSELYKYKVVKIEPLGVAPTRCKRRVVGRRRRRRAVGIGAVFLGFLGAAGSTMGAASMTLTVQARNLLSGIVQQQSNLLRAPEAQQHLLKLTVWGIKQLQARVLAVERYLRDQQLLGIWGCSGKLICCTNVPWNSSWSNRNLSEIWDNMTWLQWDKEISNYTQIIYGLLEESQNQQEKNEQDLLALDGGGSGDIIKLLNEQVNKEMNSSNLYMSMSSWCYTHSLDGAGLFLFDHAAEEYEHAKKLIIFLNENNVPVQLTSISAPEHKFEGLTQIFQKAYEHEQHISESINNIVDHAIKSKDHATFNFLQWYVAEQHEEEVLFKDILDKIELIGNENHGLYLADQYVKGIAKSRKS

SEQ ID NO: 74 - protein, 817 aa, Artificial Sequence
  Description of Artificial Sequence: Synthetic polypeptide
MPMGSLQPLATLYLLGMLVASVLAAENLWVTVYYGVPVWKEAKTTLFCASDAKAYKKEVHNVWATHACVPTDPSPQELFLENVTENFNMWKNDMVDQMHEDIISLWDQSLKPCVKLTPLCVTLICSTATVNNRAVDEMKNCSFNTTTEIRDKKKKEYALFYRSDVVPLDETNNTSEYRLINCNTSACTQACPKVTFEPIPIHYCAPAGYAILKCNDETFNGTGPCSNVSTVQCTHGIRPVVSTQLLLNGSLAEKEIVIRSENLTNNAKIIIVHLHTPVEIVCTRPNNNTRKSVRIGPGQTFYATGDIIGDIKQAHCNISEEKWNETLQKVGIELQKHFPNKTIKYNQSAGGDMEITTHSFNCGGEFFYCNTSKLFNSTYNGTYISTNSTNSTSYITLQCRIKQIINMWQGVGRCMYAPPIAGNITCRSNITGLLLTRDGGINNVSNETETFRPAGGDMRDNWRSELYKYKVVKIEPLGVAPTRCKRRVVGRRRRRRAVGIGAVFLGFLGAAGSTMGAASMTLTVQARNLLSGIVQQQSNLLRAPEAQQHLLKLTVWGIKQLQARVLAVERYLRDQQLLGIWGCSGKLICCTNVPWNSSWSNRNLSEIWDNMTWLQWDKEISNYTQIIYGLLEESQNQQEKNEQDLLALDGGGSGDIIKLLNEQVNKEMNSSNLYMSMSSWCYTHSLDGAGLFLFDHAAEEYEHAKKLIIFLNENNVPVQLTSISAPEHKFEGLTQIFQKAYEHEQHISESINNIVDHAIKSKDHATFNFLQWYVAEQHEEEVLFKDILDKIELIGNENHGLYLADQYVKGIAKSRKS

SEQ ID NO: 75 - protein, 846 aa, Artificial Sequence
  Description of Artificial Sequence: Synthetic polypeptide
MPMGSLQPLATLYLLGMLVASVLAEGNLWVTVYYGVPVWKEAKTTLFCASDAKAYKKEVANVWATHACVPTDPSPQELFLENVTENFNMWKNDMVDQMHEDIISLWDQSLKPCVKLTPLCVTLICSTATVNNRAVDEMKNCSFNTTTEIRDKKKKEYALFYRSDVVPLDETNNTSEYRLINCNTSAVTQACPKVTFEPIPIHYCAPAGYAILKCNDETFNGTGPCSNVSTVQCTHGIRPVVSTQLLLNGSLAEKEIVIRSENLTNNAKIIIVHLHTPVEIVCTRPNNNTRKSVRIGPGQTFYATGDIIGDIKQAHCNISEEKWNETLQKVGIELQKHFPNKTIKYNQSAGGDMEITTHSFNCGGEFFYCNTSKLFNSTYNGTYISTNSTNSTSYITLQCRIKQIINMWQGVGRAMYAPPIAGNITCRSNITGLLLTRDGGINNVSNETETFRPAGGDMRDNWRSELYKYKVVEVQPLGIAPTGAKRRVVEREKRAAGLGALFLGFLGAAGSTMGAASITLTVQARQLLSGIVQQQSNLLRAIEAQQHMLQLTVWGIKQLQARVLTLERYAKDQQLLGMWGCSGKLICTTNVPWNTSWSNKSEMDIWNNMTWMQWEREISNYTETIYMLLEDSQRQQERNEKDLLALDSWNSLWNWFNITNWLWYIKIFIMIVGGLIGLRIVFAVLSIVNRVRQGISPLSLQTLTPNPREPDRLRGIEEEGGEQDRDRSIRLVSGFLPIVWDDLRSLCLFSYHRLRDFLLLAARVVELLGHSSLRGLQRGWEVLKYLGSLVQYWGLELKRSAISLFDTLAIAVAEGTDRIIELIQGFCRAIRNIPTRIRQGFEASLL

SEQ ID NO: 76 - DNA, 2223 bp, Artificial Sequence
  Description of Artificial Sequence: Synthetic polynucleotide
gtcgacgccaccatgcctatgggatctctgcagcctctggccacactgtacctgctgggaatgctggtggcttctgtgctggccgagggcaatctgtgggtcacagtgtactatggcgtgcccgtgtggaaagaggccaagaccacactgttctgtgccagcgacgccaaggcctacaagaaagaggtggccaacgtctgggccacacacgcctgtgttcctaccgatccatctcctcaagagctgttcctggaaaacgtgaccgagaacttcaacatgtggaagaacgacatggtggaccagatgcacgaggacatcatcagcctgtgggaccagagcctgaagccttgcgtgaagctgacccctctgtgcgtgaccctgatctgtagcaccgccaccgtgaacaacagagccgtggacgagatgaagaactgcagcttcaacaccaccaccgagatccgggacaagaagaagaaagagtacgccctgttctatcggagcgacgtggtgcccctggacgagacaaacaacaccagcgagtaccggctgatcaactgcaacacctccgccgtgacacaggcttgccccaaagtgaccttcgagcccattcctatccactactgtgcccctgccggctacgccatcctgaagtgcaacgacgagacattcaacggcacaggcccctgcagcaatgtgtccaccgtgcagtgtacccacggcatcagaccagtggtgtctacccagctgctgctgaatggaagcctggccgagaaagaaatcgtgatcagaagcgagaacctgaccaacaacgccaagatcatcattgtgcatctgcacacccctgtggaaatcgtgtgcacccggcctaacaacaacacccggaagtctgtgcggatcggccctggccagacattctatgccaccggcgatatcatcggcgacatcaagcaggcccactgcaacatcagcgaggaaaagtggaacgagacactgcagaaagtgggcatcgagctgcagaagcacttccccaacaagaccatcaagtacaaccagagcgctggcggcgacatggaaatcaccacacacagcttcaattgtggcggcgagttcttctactgcaataccagcaagctgttcaacagcacctacaacggcacctatatcagcaccaactccaccaatagcaccagctacatcaccctgcagtgccggatcaagcagatcatcaatatgtggcaaggcgtgggcagagctatgtacgcccctcctatcgccggcaacatcacctgtcggagcaatatcacaggcctgctgctcaccagagatggcggcatcaacaacgtgtccaacgagacagaaaccttccggcctgccggcggagacatgagagacaattggagaagcgagctgtacaagtacaaggtggtggaagtgcagcccctgggaatcgctccaacaggcgctaagagaagagtggtggaacgcgagaaaagagccgctggactgggagccctgtttctgggttttctgggagccgccggaagcacaatgggagctgcctctatcacactgaccgtgcaggctagacagctgctgagcggaattgtgcagcagcagagcaacctgctgagagccattgaagcccagcagcacatgctgcagctgaccgtgtggggaatcaaacagctgcaggccagagtgctgaccctggaaagatacgccaaggaccagcagctcctcggcatgtggggatgttctggcaagctgatctgcaccaccaacgtgccctggaacacctcctggtccaacaagagcgagatggacatctggaacaacatgacctggatgcagtgggagagagagatcagcaactacaccgagacaatctacatgctgctcgaggacagccagcggcagcaagagagaaacgagaaggatctgctggccctggactcctggaatagcctgtggaactggttcaatatcaccaactggctgtggtacatcaagatcttcatcatgatcgtcggcggcctgatcggcctgagaatcgtgtttgccgtgctgagcatcgtgaacagagtgcggcagggaatcagcccactgagcctgcaaaccctgacacctaatcctagagagcccgaccggctgagaggcatcgaagaagaaggcggcgagcaggacagagacagatccatcagactggtgtcctgataaggatcc

SEQ ID NO: 77 - DNA, 2109 bp, Artificial Sequence
  Description of Artificial Sequence: Synthetic polynucleotide
gtcgacgccaccatgcctatgggatctctgcagcctctggccacactgtacctgctgggaatgctggtggcttctgtgctggccgagggcaatctgtgggtcacagtgtactatggcgtgcccgtgtggaaagaggccaagaccacactgttctgtgccagcgacgccaaggcctacaagaaagaggtggccaacgtctgggccacacacgcctgtgttcctaccgatccatctcctcaagagctgttcctggaaaacgtgaccgagaacttcaacatgtggaagaacgacatggtggaccagatgcacgaggacatcatcagcctgtgggaccagagcctgaagccttgcgtgaagctgacccctctgtgcgtgaccctgatctgtagcaccgccaccgtgaacaacagagccgtggacgagatgaagaactgcagcttcaacaccaccaccgagatccgggacaagaagaagaaagagtacgccctgttctatcggagcgacgtggtgcccctggacgagacaaacaacaccagcgagtaccggctgatcaactgcaacacctccgccgtgacacaggcttgccccaaagtgaccttcgagcccattcctatccactactgtgcccctgccggctacgccatcctgaagtgcaacgacgagacattcaacggcacaggcccctgcagcaatgtgtccaccgtgcagtgtacccacggcatcagaccagtggtgtctacccagctgctgctgaatggaagcctggccgagaaagaaatcgtgatcagaagcgagaacctgaccaacaacgccaagatcatcattgtgcatctgcacacccctgtggaaatcgtgtgcacccggcctaacaacaacacccggaagtctgtgcggatcggccctggccagacattctatgccaccggcgatatcatcggcgacatcaagcaggcccactgcaacatcagcgaggaaaagtggaacgagacactgcagaaagtgggcatcgagctgcagaagcacttccccaacaagaccatcaagtacaaccagagcgctggcggcgacatggaaatcaccacacacagcttcaattgtggcggcgagttcttctactgcaataccagcaagctgttcaacagcacctacaacggcacctatatcagcaccaactccaccaatagcaccagctacatcaccctgcagtgccggatcaagcagatcatcaatatgtggcaaggcgtgggcagagctatgtacgcccctcctatcgccggcaacatcacctgtcggagcaatatcacaggcctgctgctcaccagagatggcggcatcaacaacgtgtccaacgagacagaaaccttccggcctgccggcggagacatgagagacaattggagaagcgagctgtacaagtacaaggtggtggaagtgcagcccctgggaatcgctccaacaggcgctaagagaagagtggtggaacgcgagaaaagagccgctggactgggagccctgtttctgggttttctgggagccgccggaagcacaatgggagctgcctctatcacactgaccgtgcaggctagacagctgctgagcggaattgtgcagcagcagagcaacctgctgagagccattgaagcccagcagcacatgctgcagctgaccgtgtggggaatcaaacagctgcaggccagagtgctgaccctggaaagatacgccaaggaccagcagctcctcggcatgtggggatgttctggcaagctgatctgcaccaccaacgtgccctggaacacctcctggtccaacaagagcgagatggacatctggaacaacatgacctggatgcagtgggagagagagatcagcaactacaccgagacaatctacatgctgctcgaggacagccagcggcagcaagagagaaacgagaaggatctgctggccctggactcctggaatagcctgtggaactggttcaatatcaccaactggctgtggtacatcaagatcttcatcatgatcgtcggcggcctgatcggcctgagaatcgtgtttgccgtgctgagcatcgtgaacagagtgcggcagggatactgataaggatcc

SEQ ID NO: 78 - DNA, 2475 bp, Artificial Sequence
  Description of Artificial Sequence: Synthetic polynucleotide
gtcgacgccaccatgggatctctgcaacctctggccacactgtacctgctgggaatgctggtggcttctgtgctggccgccgagaatctgtgggtcacagtgtactatggcgtgcccgtgtggaaagaggccaagaccacactgttctgtgccagcgacgccaaggcctacaagaaagaggtgcacaacgtctgggccacacacgcctgtgtgcctaccgatccatctcctcaagagctgttcctggaaaacgtgaccgagaacttcaacatgtggaagaacgacatggtggaccagatgcacgaggacatcatcagcctgtggtgccagagcctgaagccttgcgtgaagctgacccctctgtgcgtgaccctgatctgtagcaccgccaccgtgaacaacagagccgtggacgagatgaagaactgcagcttcaacaccaccaccgagatccgggacaagaagaagaaagagtacgccctgttctatcggagcgacgtggtgcccctggacgagacaaacaacaccagcgagtaccggctgatcaactgcaacacctccgccgtgactcaggcctgtcctaaagtgaccttcgagcccattcctatccactactgtgcccctgccggctacgccatcctgaagtgcaacaacgagacattcaacggcacaggcccctgcagcaatgtgtccaccgtgcagtgtacccacggcatcagaccagtggtgtctacccagctgctgctgaatggaagcctggccgagaaagaaatcgtgatcagaagcgagaacctgaccaacaacgccaagatcatcattgtgcatctgaacacctctgtggaaatcgtgtgcacccggcctaacaacaacacccggaagtctgtgcggatcggccctggccagacattctatgccaccggcgatatcatcggcgacatcaagcaggcccactgcaacatcagcgaggaaaagtggaacgagacactgcagaaagtgggcatcgagctgcagaagcacttccccaacaagaccatcaagtacaaccagagcgctggcggcgacatggaaatcaccacacacagcttcaattgtggcggcgagttcttctactgcaataccagcaagctgttcaacagcacctacaacggcacctatatcagcaccaactccaccaatagcaccagctacatcaccctgcagtgccggatcaagcagatcatcaatatgtggcaaggctgcggcgtcggccgggctatgtacgcccctcctatcgccggcaacatcacctgtcggagcaatatcacaggcctgctgctcaccagagatggcggcatcaacaacgtgtccaacgagacagaaaccttccggcctgccggcggagacatgagagacaattggagaagcgagctgtacaagtacaaggtggtcaagatcgagcccctgggcgtcgcaccaacacggtgcaagagaagagtcgtgggccgtcgtagaaggcggagagccgttggaattggcgccgtgttcctgggctttctgggagccgctggatctacaatgggcgctgccagcatgaccctgacagtgcaggctagaaatctgctgagcggcatcgtgcagcagcagagcaatctgctcagagcccctgaggctcagcagcacctcctgaaactgacagtgtggggaatcaagcagctgcaggccagagtgctggcagtggaaagatacctgagggaccagcagctcctcggaatctggggatgtagcggcaagctgatctgctgcaccaacgtgccctggaactccagctggtccaaccggaatctgagcgagatctgggataacatgacctggctgcagtgggacaaagagatcagcaactacacccagatcatctacggcctgctggaagagagccagaaccagcaagagaaaaacgagcaggacctgctggccctggacggcggaggatctggcgacattatcaagctgctgaacgagcaagtgaacaaagagatgaacagctccaacctgtacatgagcatgagcagctggtgttacacccacagccttgatggcgccggactgttcctgtttgatcacgccgccgaggaatacgagcacgccaagaagctgatcatcttcctgaacgagaacaatgtgcccgtgcagctgaccagcattagcgccccagagcacaagttcgagggcctgacacagatctttcagaaggcctacgaacacgagcagcacatctccgagagcatcaacaacatcgtggaccacgccattaagagcaaggatcacgccaccttcaattttctgcagtggtacgtggccgaacagcacgaggaagaagtgctgttcaaggacatcctggacaagattgagctgatcggcaacgagaaccacggcctgtatctggccgaccagtacgtgaagggaatcgccaagagccggaagtcctgataaggatcc

SEQ ID NO: 79 - DNA, 2469 bp, Artificial Sequence
  Description of Artificial Sequence: Synthetic polynucleotide
gtcgacgccaccatgggatctctgcaacctctggccacactgtacctgctgggaatgctggtggcttctgtgctggccgccgagaatctgtgggtcacagtgtactatggcgtgcccgtgtggaaagaggcctgcaccacactgttctgtgccagcgacgccaaggcctacaagaaaaaggtgcggaacgtctgggccacacactgctgtgtgcctaccgatccatctcctcaagagctgttcctggaaaacgtgaccgagaacttcaacatgtggaagaacgacatggtggaccagatgcacgaggacatcatcagcctgtgggaccagagcctgaagccttgcgtgaagctgacccctctgtgcgtgaccctgatctgtagcaccgccaccgtgaacaacagagccgtggacgagatgaagaactgcagcttcaacaccaccaccgagatccgggacaagaagaagaaagagtacgccctgttctatcggagcgacgtggtgcccctggacgagacaaacaacaccagcgagtaccggctgatcaactgcaacacctccgcctgcactcaggcctgtcctaaagtgaccttcgagcccattcctatccactactgtgcccctgccggctacgccatcctgaagtgcaacaacgagacattcaacggcacaggcccctgcagcaatgtgtccaccgtgcagtgtacccacggcatcagaccagtggtgtctacccagctgctgctgaatggaagcctggccgagaaagaaatcgtgatcagaagcgagaacctgaccaacaacgccaagatcatcattgtgcatctgaacacctctgtggaaatcgtgtgcacccggcctaacaacaacacccggaagtctgtgcggatcggccctggccagtggttctatgccaccggcgatatcatcggcgacatcaagcaggcccactgcaacatcagcgaggaaaagtggaacgagacactgcagaaagtgggcatcgagctgcagaagcacttccccaacaagaccatcaagtacaaccagagcgctggcggcgacatggaaatcaccacacacagcttcaattgtggcggcgagttcttctactgcaataccagcaagctgttcaacagcacctacaacggcacctatatcagcaccaactccaccaatagcaccagctacatcaccctgcagtgccggatcaagcagatcatcaatatgtggcaaggcgtcggccggtgtatgtacgcccctcctatcgccggcaacatcacctgtcggagcaatatcacaggcctgctgctcaccagagatggcggcatcaacaacgtgtccaacgagacagaaaccttccggcctgccggcggagacatgagagacaattggagaagcgagctgtacaagtacaaggtggtcaagatcgagcccctgggcgtcgcaccaacacggtgcaagagaagagtcgtgggccgtcgtagaaggcggagagccgttggaattggcgccgtgttcctgggctttctgggagccgctggatctacaatgggcgctgccagcatgaccctgacagtgcaggctagaaatctgctgagcggcatcgtgcagcagcagagcaattgcctcagagcccctgagtgccagcagcacctcctgaaactgacagtgtggggaatcaagcagctgcaggccagagtgctggcagtggaaagatacctgagggaccagcagctcctcggaatctggggatgtagcggcaagctgatctgctgcaccaacgtgccctggaactccagctggtccaaccggaatctgagcgagatctgggataacatgacctggctgcagtgggacaaagagatcagcaactacacccagatcatctacggcctgctggaagagagccagaaccagcaagagaaaaacgagcaggacctgctggccctggacggcggaggatctggcgacattatcaagctgctgaacgagcaagtgaacaaagagatgaacagctccaacctgtacatgagcatgagcagctggtgttacacccacagccttgatggcgccggactgttcctgtttgatcacgccgccgaggaatacgagcacgccaagaagctgatcatcttcctgaacgagaacaatgtgcccgtgcagctgaccagcattagcgccccagagcacaagttcgagggcctgacacagatctttcagaaggcctacgaacacgagcagcacatctccgagagcatcaacaacatcgtggaccacgccattaagagcaaggatcacgccaccttcaattttctgcagtggtacgtggccgaacagcacgaggaagaagtgctgttcaaggacatcctggacaagattgagctgatcggcaacgagaaccacggcctgtatctggccgaccagtacgtgaagggaatcgccaagagccggaagtcctgataaggatcc

SEQ ID NO: 80 - DNA, 2469 bp, Artificial Sequence
  Description of Artificial Sequence: Synthetic polynucleotide
gtcgacgccaccatgggatctctgcaacctctggccacactgtacctgctgggaatgctggtggcttctgtgctggccgccgagaatctgtgggtcacagtgtactatggcgtgcccgtgtggaaagaggccaagaccacactgttctgtgccagcgacgccaaggcctacaagaaagaggtgcacaacatctgggccacacacgcctgtgtgcctaccgatccatctcctcaagagctgttcctggaaaacgtgaccgagaacttcaacatgtggaagaacgacatggtggaccagatgcacgaggacatcatcagcctgtgggaccagagcctgaagccttgcgtgaagctgacccctctgtgcgtgaccctgatctgtagcaccgccaccgtgaacaacagagccgtggacgagatgaagaactgcagcttcaacaccaccaccgagatccgggacaagaagaagaaagagtacgccctgttctatcggagcgacgtggtgcccctggacgagacaaacaacaccagcgagtaccggctgatcaactgcaacacctccgccgtgactatggtgtgtcctaaactgaccttcgagcccattcctatccactactgtgcccctgccggctacgccatcctgaagtgcaacaacgagacattcaacggcacaggcccctgcagcaatgtgtccaccgtgcagtgtacccacggcatcagaccagtgctgtctacccagctgctgctgaatggaagcctggccgagaaagaaatcgtgatcagaagcgagaacctgaccaacaacgccaagatcatcattgtgcatctgaacacctctgtggaaatcgtgtgcacccggcctctgaacctgacccggaagtctgtgcggatcggccctggccagacattctatgccatgggcgatatcatcggcgacatcaagcaggcccactgcaacatcagcgaggaaaagtggaacgagacactgcagaaagtgggcatcgagctgcagaagcacttccccaacaagaccatcaagtacaaccagagcgctggcggcgacatggaaatcaccacacacagcttcaattgtggcggcgagttcttctactgcaataccagcaagctgttcaacagcacctacaacggcacctatatcagcaccaactccaccaatagcaccagctacatcaccctgcagtgccggatcaagatgatcatcaatatgtggcaaggcgtcggccgggctatgtacgcccctcctatcgccggcaacatcacctgtcggagcaatatcacaggcctgctgctcaccagagatggcggcatcaacaacgtgtccaacgagacagaaaccttccggcctgccggcggagacatgagagacaattggagaagcgagctgtacaagtacaaggtggtcaagatcgagcccctgggcgtcgcaccaacacggtgcaagagaagagtcgtgggccgtcgtagaaggcggagagccgttggaattggcgccgtgttcctgggctttctgggagccgctggatctacaatgggcgctgccagcatgaccctgacagtgcaggctagaaatctgctgagcggcatcgtgcagcagcagagcaatctgctcagagcccctgaggctcagcagcacctcctgaaactgacagtgtggggaatcaagcagctgcaggccagagtgctggcagtggaaagatacctgagggaccagcagctcctcggaatctggggatgtagcggcaagctgatctgctgcaccaacgtgccctggaactccagctggtccaaccggaatctgagcgagatctgggataacatgacctggctgcagtgggacaaagagatcagcaactacacccagatcatctacggcctgctggaagagagccagaaccagcaagagaaaaacgagcaggacctgctggccctggacggcggaggatctggcgacattatcaagctgctgaacgagcaagtgaacaaagagatgaacagctccaacctgtacatgagcatgagcagctggtgttacacccacagccttgatggcgccggactgttcctgtttgatcacgccgccgaggaatacgagcacgccaagaagctgatcatcttcctgaacgagaacaatgtgcccgtgcagctgaccagcattagcgccccagagcacaagttcgagggcctgacacagatctttcagaaggcctacgaacacgagcagcacatctccgagagcatcaacaacatcgtggaccacgccattaagagcaaggatcacgccaccttcaattttctgcagtggtacgtggccgaacagcacgaggaagaagtgctgttcaaggacatcctggacaagattgagctgatcggcaacgagaaccacggcctgtatctggccgaccagtacgtgaagggaatcgccaagagccggaagtcctgataaggatcc

SEQ ID NO: 81 - DNA, 2469 bp, Artificial Sequence
  Description of Artificial Sequence: Synthetic polynucleotide
gtcgacgccaccatgggatctctgcaacctctggccacactgtacctgctgggaatgctggtggcttctgtgctggccgccgagaatctgtgggtcacagtgtactatggcgtgcccgtgtggaaagaggcctgcaccacactgttctgtgccagcgacgccaaggcctacaagaaaaaggtgcggaacgtctgggccacacactgctgtgtgcctaccgatccatctcctcaagagctgttcctggaaaacgtgaccgagaacttcaacatgtggaagaacgacatggtggaccagatgcacgaggacatcatcagcctgtgggaccagagcctgaagccttgcgtgaagctgacccctctgtgcgtgaccctgatctgtagcaccgccaccgtgaacaacagagccgtggacgagatgaagaactgcagcttcaacaccaccaccgagatccgggacaagaagaagaaagagtacgccctgttctatcggagcgacgtggtgcccctggacgagacaaacaacaccagcgagtaccggctgatcaactgcaacacctccgccgtgactcaggcctgtcctaaagtgaccttcgagcccattcctatccactactgtgcccctgccggctacgccatcctgaagtgcaacaacgagacattcaacggcacaggcccctgcagcaatgtgtccaccgtgcagtgtacccacggcatcagaccagtggtgtctacccagctgctgctgaatggaagcctggccgagaaagaaatcgtgatcagaagcgagaacctgaccaacaacgccaagatcatcattgtgcatctgaacacctctgtggaaatcgtgtgcacccggcctaacaacaacacccggaagtctgtgcggatcggccctggccagtggttctatgccaccggcgatatcatcggcgacatcaagcaggcccactgcaacatcagcgaggaaaagtggaacgagacactgcagaaagtgggcatcgagctgcagaagcacttccccaacaagaccatcaagtacaaccagagcgctggcggcgacatggaaatcaccacacacagcttcaattgtggcggcgagttcttctactgcaataccagcaagctgttcaacagcacctacaacggcacctatatcagcaccaactccaccaatagcaccagctacatcaccctgcagtgccggatcaagcagatcatcaatatgtggcaaggcgtcggccgggctatgtacgcccctcctatcgccggcaacatcacctgtcggagcaatatcacaggcctgctgctcaccagagatggcggcatcaacaacgtgtccaacgagacagaaaccttccggcctgccggcggagacatgagagacaattggagaagcgagctgtacaagtacaaggtggtcaagatcgagcccctgggcgtcgcaccaacacggtgcaagagaagagtcgtgggccgtcgtagaaggcggagagccgttggaattggcgccgtgttcctgggctttctgggagccgctggatctacaatgggcgctgccagcatgaccctgacagtgcaggctagaaatctgctgagcggcatcgtgcagcagcagagcaattgcctcagagcccctgagtgccagcagcacctcctgaaactgacagtgtggggaatcaagcagctgcaggccagagtgctggcagtggaaagatacctgagggaccagcagctcctcggaatctggggatgtagcggcaagctgatctgctgcaccaacgtgccctggaactccagctggtccaaccggaatctgagcgagatctgggataacatgacctggctgcagtgggacaaagagatcagcaactacacccagatcatctacggcctgctggaagagagccagaaccagcaagagaaaaacgagcaggacctgctggccctggacggcggaggatctggcgacattatcaagctgctgaacgagcaagtgaacaaagagatgaacagctccaacctgtacatgagcatgagcagctggtgttacacccacagccttgatggcgccggactgttcctgtttgatcacgccgccgaggaatacgagcacgccaagaagctgatcatcttcctgaacgagaacaatgtgcccgtgcagctgaccagcattagcgccccagagcacaagttcgagggcctgacacagatctttcagaaggcctacgaacacgagcagcacatctccgagagcatcaacaacatcgtggaccacgccattaagagcaaggatcacgccaccttcaattttctgcagtggtacgtggccgaacagcacgaggaagaagtgctgttcaaggacatcctggacaagattgagctgatcggcaacgagaaccacggcctgtatctggccgaccagtacgtgaagggaatcgccaagagccggaagtcctgataaggatcc

SEQ ID NO: 82 - DNA, 2469 bp, Artificial Sequence
  Description of Artificial Sequence: Synthetic polynucleotide
gtcgacgccaccatgggatctctgcaacctctggccacactgtacctgctgggaatgctggtggcttctgtgctggccgccgagaatctgtgggtcacagtgtactatggcgtgcccgtgtggaaagaggccaagaccacactgttctgtgccagcgacgccaaggcctacaagaaagaggtgcacaacgtctgggccacacacgcctgtgtgcctaccgatccatctcctcaagagctgttcctggaaaacgtgaccgagaacttcaacatgtggaagaacgacatggtggaccagatgcacgaggacatcatcagcctgtgggaccagagcctgaagccttgcgtgaagctgacccctctgtgcgtgaccctgatctgtagcaccgccaccgtgaacaacagagccgtggacgagatgaagaactgcagcttcaacaccaccaccgagatccgggacaagaagaagaaagagtacgccctgttctatcggagcgacgtggtgcccctggacgagacaaacaacaccagcgagtaccggctgatcaactgcaacacctccgcctgcactcaggcctgtcctaaagtgaccttcgagcccattcctatccactactgtgcccctgccggctacgccatcctgaagtgcaacaacgagacattcaacggcacaggcccctgcagcaatgtgtccaccgtgcagtgtacccacggcatcagaccagtggtgtctacccagctgctgctgaatggaagcctggccgagaaagaaatcgtgatcagaagcgagaacctgaccaacaacgccaagatcatcattgtgcatctgaacacctctgtggaaatcgtgtgcacccggcctaacaacaacacccggaagtctgtgcggatcggccctggccagacattctatgccaccggcgatatcatcggcgacatcaagcaggcccactgcaacatcagcgaggaaaagtggaacgagacactgcagaaagtgggcatcgagctgcagaagcacttccccaacaagaccatcaagtacaaccagagcgctggcggcgacatggaaatcaccacacacagcttcaattgtggcggcgagttcttctactgcaataccagcaagctgttcaacagcacctacaacggcacctatatcagcaccaactccaccaatagcaccagctacatcaccctgcagtgccggatcaagcagatcatcaatatgtggcaaggcgtcggccggtgtatgtacgcccctcctatcgccggcaacatcacctgtcggagcaatatcacaggcctgctgctcaccagagatggcggcatcaacaacgtgtccaacgagacagaaaccttccggcctgccggcggagacatgagagacaattggagaagcgagctgtacaagtacaaggtggtcaagatcgagcccctgggcgtcgcaccaacacggtgcaagagaagagtcgtgggccgtcgtagaaggcggagagccgttggaattggcgccgtgttcctgggctttctgggagccgctggatctacaatgggcgctgccagcatgaccctgacagtgcaggctagaaatctgctgagcggcatcgtgcagcagcagagcaatctgctcagagcccctgaggctcagcagcacctcctgaaactgacagtgtggggaatcaagcagctgcaggccagagtgctggcagtggaaagatacctgagggaccagcagctcctcggaatctggggatgtagcggcaagctgatctgctgcaccaacgtgccctggaactccagctggtccaaccggaatctgagcgagatctgggataacatgacctggctgcagtgggacaaagagatcagcaactacacccagatcatctacggcctgctggaagagagccagaaccagcaagagaaaaacgagcaggacctgctggccctggacggcggaggatctggcgacattatcaagctgctgaacgagcaagtgaacaaagagatgaacagctccaacctgtacatgagcatgagcagctggtgttacacccacagccttgatggcgccggactgttcctgtttgatcacgccgccgaggaatacgagcacgccaagaagctgatcatcttcctgaacgagaacaatgtgcccgtgcagctgaccagcattagcgccccagagcacaagttcgagggcctgacacagatctttcagaaggcctacgaacacgagcagcacatctccgagagcatcaacaacatcgtggaccacgccattaagagcaaggatcacgccaccttcaattttctgcagtggtacgtggccgaacagcacgaggaagaagtgctgttcaaggacatcctggacaagattgagctgatcggcaacgagaaccacggcctgtatctggccgaccagtacgtgaagggaatcgccaagagccggaagtcctgataaggatcc

SEQ ID NO: 83 - DNA, 2475 bp, Artificial Sequence
  Description of Artificial Sequence: Synthetic polynucleotide
gtcgacgccaccatgcctatgggatctctgcagcctctggccacactgtacctgctgggaatgctggtggcttctgtgctggccgccgagaatctgtgggtcacagtgtactatggcgtgcccgtgtggaaagaggccaagaccacactgttctgtgccagcgacgccaaggcctacaagaaagaggtgcacaacatctgggccacacacgcctgcgtgccaaccgatccatctcctcaagagctgttcctggaaaacgtgaccgagaacttcaacatgtggaagaacgacatggtggaccagatgcacgaggacatcatcagcctgtgggaccagagcctgaagccttgcgtgaagctgacccctctgtgcgtgaccctgatctgtagcaccgccaccgtgaacaacagagccgtggacgagatgaagaactgcagcttcaacaccaccaccgagatccgggacaagaagaagaaagagtacgccctgttctatcggagcgacgtggtgcccctggacgagacaaacaacaccagcgagtaccggctgatcaactgcaacacctccgccgtgacacaagtgtgccccaagctgaccttcgagcccattcctatccactactgtgcccctgccggctacgccatcctgaagtgcaacaacgagacattcaacggcacaggcccctgcagcaatgtgtccaccgtgcagtgtacccacggcatcagacctgtgctgagcacacagctgctgctgaatggaagcctggccgagaaagaaatcgtgatcagaagcgagaacctgaccaacaacgccaagatcatcatcgtgcacctgaataccagcgtggaaatcgtgtgcacccggcctaacaacaacacccggaagtctgtgcggatcggccctggccagacattctatgccaccggcgatatcatcggcgacatcaagcaggcccactgcaacatcagcgaggaaaagtggaacgagacactgcagaaagtgggcatcgagctgcagaagcacttccccaacaagaccatcaagtacaaccagagcgctggcggcgacatggaaatcaccacacacagcttcaattgtggcggcgagttcttctactgcaataccagcaagctgttcaacagcacctacaacggcacctatatcagcaccaactccaccaatagcaccagctacatcaccctgcagtgccggatcaagcagatcatcaatatgtggcaaggcgtgggcagagctatgtacgcccctcctatcgccggcaacatcacctgtcggagcaatatcacaggcctgctgctcaccagagatggcggcatcaacaacgtgtccaacgaaaccgaaaccttccggcctgccggcggagacatgagagacaattggagaagcgagctgtacaagtacaaggtggtcaagatcgagcccctgggcgtcgcaccaacacggtgcaagagaagagtcgtgggacgtagacgaaggcggagagccgttggaatcggagccgtgttcctgggctttctgggagccgctggatctacaatgggcgctgccagcatgaccctgacagtgcaggctagaaatctgctgagcggcatcgtgcagcagcagagcaatctgctcagagcccctgaggctcagcagcacctcctgaaactgacagtgtggggaatcaagcagctgcaggccagagtgctggcagtggaaagatacctgagggaccagcagctcctcggaatctggggatgtagcggcaagctgatctgctgcaccaacgtgccctggaacagcagctggtccaaccggaatctgagcgagatctgggataacatgacctggctgcagtgggacaaagagatcagcaactacacccagatcatctacggcctgctggaagagagccagaaccagcaagagaaaaacgagcaggacctgctggccctggatggcggaggatctggcgacattatcaagctgctgaacgagcaagtgaacaaagaaatgaacagctccaacctgtacatgagcatgtccagctggtgttacacccacagccttgatggcgccggactgttcctgtttgatcacgccgccgaggaatacgagcacgccaagaagctgatcatcttcctgaacgagaacaatgtgcccgtgcagctgaccagcatctctgcccctgagcacaagttcgagggcctgacacagatctttcagaaggcctacgaacacgagcagcacatctccgagtccatcaacaatatcgtggaccacgccattaagagcaaggatcacgccaccttcaactttctccagtggtacgtggccgaacagcacgaggaagaagtgctgttcaaggacatcctggacaagattgagctgatcggcaacgagaaccacggcctgtatctggccgaccagtacgtgaagggaatcgccaagagccggaagtcctgatgaggatcc

SEQ ID NO: 84 - DNA, 2448 bp, Artificial Sequence
  Description of Artificial Sequence: Synthetic polynucleotide
gtcgacgccaccatgcctatgggatctctgcagcctctggccacactgtacctgctgggaatgctggtggcttctgtgctggccgagggcaatctgtgggtcacagtgtactatggcgtgcccgtgtggaaagaggccaagaccacactgttctgtgccagcgacgccaaggcctacaagaaagaggtgcacaacgtctgggccacacacgcctgtgtgcctaccgatccatctcctcaagagctgttcctggaaaacgtgaccgagaacttcaacatgtggaagaacgacatggtggaccagatgcacgaggacatcatcagcctgtgggaccagagcctgaagccttgcgtgaagctgacccctctgtgcgtgaccctgatctgtagcaccgccaccgtgaacaacagagccgtggacgagatgaagaactgcagcttcaacaccaccaccgagatccgggacaagaagaagaaagagtacgccctgttctatcggagcgacgtggtgcccctggacgagacaaacaacaccagcgagtaccggctgatcaactgcaacacctccgcctgcactcaggcctgtcctaaagtgaccttcgagcccattcctatccactactgtgcccctgccggctacgccatcctgaagtgcaacaacgagacattcaacggcacaggcccctgcagcaatgtgtccaccgtgcagtgtacccacggcatcagaccagtggtgtctacccagctgctgctgaatggaagcctggccgagaaagaaatcgtgatcagaagcgagaacctgaccaacaacgccaagatcatcatcgtgcacctgaataccagcgtggaaatcgtgtgcacccggcctaacaacaacacccggaagtctgtgcggatcggccctggccagacattctatgccaccggcgatatcatcggcgacatcaagcaggcccactgcaacatcagcgaggaaaagtggaacgagacactgcagaaagtgggcatcgagctgcagaagcacttccccaacaagaccatcaagtacaaccagagcgctggcggcgacatggaaatcaccacacacagcttcaattgtggcggcgagttcttctactgcaataccagcaagctgttcaacagcacctacaacggcacctatatcagcaccaactccaccaatagcaccagctacatcaccctgcagtgccggatcaagcagatcatcaatatgtggcaaggcgtcggccggtgtatgtacgcccctcctatcgccggcaacatcacctgtcggagcaatatcacaggcctgctgctcaccagagatggcggcatcaacaacgtgtccaacgaaaccgaaaccttccggcctgccggcggagacatgagagacaattggagaagcgagctgtacaagtacaaggtggtggaagtgcagcccctgggaatcgctcctaccggctgcaagagaagagtggttgaaggcggcggaggatctggcggaggcggatctgctgttggaatcggagctgtgttcctgggctttctgggagccgccggatctacaatgggagctgccagcatgaccctgaccgtgcaggctagaaatctgctgagcggcaaccccgactggctgcctgatatgacagtgtggggaatcaagcagctgcaggccagagtgctggcagtggaaagatacctgagggaccagcagctcctcggaatctggggatgtagcggcaagctgatctgctgcaccaacgtgccctggaactccagctggtccaaccggaatctgagcgagatctgggataacatgacctggctgcagtgggacaaagagatcagcaactacacccagatcatctacggcctgctggaagagagccagaaccagcaagagaaaaacgagcaggacctgctggccctggatggcggaggaagcggagatatcatcaagctgctgaacgagcaagtgaacaaagaaatgaacagcagcaacctgtacatgagcatgagcagctggtgttacacccacagccttgatggcgccggactgttcctgtttgatcacgccgccgaggaatacgagcacgccaagaagctgatcatcttcctgaacgagaacaatgtgcccgtgcagctgaccagcatctctgcccctgagcacaagttcgagggcctgacacagatctttcagaaggcctacgaacacgagcagcacatctccgagtccatcaacaatatcgtggaccacgccattaagagcaaggatcacgccaccttcaactttctccagtggtacgtggccgaacagcacgaggaagaagtgctgttcaaggacatcctggacaagatcgagctgatcggcaacgagaaccacggcctgtatctggccgaccagtacgtgaagggaatcgccaagagccggaagtcctgatgaggatcc

SEQ ID NO: 85 - DNA, 2475 bp, Artificial Sequence
  Description of Artificial Sequence: Synthetic polynucleotide
gtcgacgccaccatgcctatgggatctctgcagcctctggccacactgtacctgctgggaatgctggtggcttctgtgctggccgccgagaatctgtgggtcacagtgtactatggcgtgcccgtgtggaaagaggccaagaccacactgttctgtgccagcgacgccaaggcctacaagaaagaggtggccaacgtctgggccacacacgcctgtgttcctaccgatccatctcctcaagagctgttcctggaaaacgtgaccgagaacttcaacatgtggaagaacgacatggtggaccagatgcacgaggacatcatcagcctgtgggaccagagcctgaagccttgcgtgaagctgacccctctgtgcgtgaccctgatctgtagcaccgccaccgtgaacaacagagccgtggacgagatgaagaactgcagcttcaacaccaccaccgagatccgggacaagaagaagaaagagtacgccctgttctatcggagcgacgtggtgcccctggacgagacaaacaacaccagcgagtaccggctgatcaactgcaacacctccgccgtgacacaggcttgccccaaagtgaccttcgagcccattcctatccactactgtgcccctgccggctacgccatcctgaagtgcaacaacgagacattcaacggcacaggcccctgcagcaatgtgtccaccgtgcagtgtacccacggcatcagaccagtggtgtctacccagctgctgctgaatggaagcctggccgagaaagaaatcgtgatcagaagcgagaacctgaccaacaacgccaagatcatcatcgtgcacctgaataccagcgtggaaatcgtgtgcacccggcctaacaacaacacccggaagtctgtgcggatcggccctggccagacattctatgccaccggcgatatcatcggcgacatcaagcaggcccactgcaacatcagcgaggaaaagtggaacgagacactgcagaaagtgggcatcgagctgcagaagcacttccccaacaagaccatcaagtacaaccagagcgctggcggcgacatggaaatcaccacacacagcttcaattgtggcggcgagttcttctactgcaataccagcaagctgttcaacagcacctacaacggcacctatatcagcaccaactccaccaatagcaccagctacatcaccctgcagtgccggatcaagcagatcatcaatatgtggcaaggcgtgggcagagctatgtacgcccctcctatcgccggcaacatcacctgtcggagcaatatcacaggcctgctgctcaccagagatggcggcatcaacaacgtgtccaacgaaaccgaaaccttccggcctgccggcggagacatgagagacaattggagaagcgagctgtacaagtacaaggtggtcaagatcgagcccctgggcgtcgcaccaacacggtgcaagagaagagtcgtgggacgtagacgaaggcggagagccgttggaatcggagccgtgttcctgggctttctgggagccgctggatctacaatgggcgctgccagcatgaccctgacagtgcaggctagaaatctgctgagcggcatcgtgcagcagcagagcaatctgctcagagcccctgaggctcagcagcacctcctgaaactgacagtgtggggaatcaagcagctgcaggccagagtgctgaccgtggaaagatacgccagagatcagcagctcctcggaatctggggctgtagcggcaagctgatctgctgcaccaacgtgccctggaactccagctggtccaaccggaatctgagcgagatctgggataacatgacctggctgcagtgggacaaagagatctccaactacacccagatcatctacggcctgctggaagagagccagaaccagcaagagaaaaacgagcaggacctgctggccctggatggcggaggatctggcgacattatcaagctgctgaacgagcaagtgaacaaagaaatgaacagcagcaacctgtacatgagcatgagcagctggtgttacacccacagccttgatggcgccggactgttcctgtttgatcacgccgccgaggaatacgagcacgccaagaagctgatcatcttcctgaacgagaacaatgtgcccgtgcagctgaccagcatctctgcccctgagcacaagttcgagggcctgacacagatctttcagaaggcctacgaacacgagcagcacatctccgagtccatcaacaatatcgtggaccacgccattaagagcaaggatcacgccaccttcaactttctccagtggtacgtggccgaacagcacgaggaagaagtgctgttcaaggacatcctggacaagattgagctgatcggcaacgagaaccacggcctgtatctggccgaccagtacgtgaagggaatcgccaagagccggaagtcctgatgaggatcc

SEQ ID NO: 86 - protein, 733 aa, Artificial Sequence
  Description of Artificial Sequence: Synthetic polypeptide
MPMGSLQPLATLYLLGMLVASVLAEGNLWVTVYYGVPVWKEAKTTLFCASDAKAYKKEVANVWATHACVPTDPSPQELFLENVTENFNMWKNDMVDQMHEDIISLWDQSLKPCVKLTPLCVTLICSTATVNNRAVDEMKNCSFNTTTEIRDKKKKEYALFYRSDVVPLDETNNTSEYRLINCNTSAVTQACPKVTFEPIPIHYCAPAGYAILKCNDETFNGTGPCSNVSTVQCTHGIRPVVSTQLLLNGSLAEKEIVIRSENLTNNAKIIIVHLHTPVEIVCTRPNNNTRKSVRIGPGQTFYATGDIIGDIKQAHCNISEEKWNETLQKVGIELQKHFPNKTIKYNQSAGGDMEITTHSFNCGGEFFYCNTSKLFNSTYNGTYISTNSTNSTSYITLQCRIKQIINMWQGVGRAMYAPPIAGNITCRSNITGLLLTRDGGINNVSNETETFRPAGGDMRDNWRSELYKYKVVEVQPLGIAPTGAKRRVVEREKRAAGLGALFLGFLGAAGSTMGAASITLTVQARQLLSGIVQQQSNLLRAIEAQQHMLQLTVWGIKQLQARVLTLERYAKDQQLLGMWGCSGKLICTTNVPWNTSWSNKSEMDIWNNMTWMQWEREISNYTETIYMLLEDSQRQQERNEKDLLALDSWNSLWNWFNITNWLWYIKIFIMIVGGLIGLRIVFAVLSIVNRVRQGISPLSLQTLTPNPREPDRLRGIEEEGGEQDRDRSIRLVS

SEQ ID NO: 87 - protein, 695 aa, Artificial Sequence
  Description of Artificial Sequence: Synthetic polypeptide
MPMGSLQPLATLYLLGMLVASVLAEGNLWVTVYYGVPVWKEAKTTLFCASDAKAYKKEVANVWATHACVPTDPSPQELFLENVTENFNMWKNDMVDQMHEDIISLWDQSLKPCVKLTPLCVTLICSTATVNNRAVDEMKNCSFNTTTEIRDKKKKEYALFYRSDVVPLDETNNTSEYRLINCNTSAVTQACPKVTFEPIPIHYCAPAGYAILKCNDETFNGTGPCSNVSTVQCTHGIRPVVSTQLLLNGSLAEKEIVIRSENLTNNAKIIIVHLHTPVEIVCTRPNNNTRKSVRIGPGQTFYATGDIIGDIKQAHCNISEEKWNETLQKVGIELQKHFPNKTIKYNQSAGGDMEITTHSFNCGGEFFYCNTSKLFNSTYNGTYISTNSTNSTSYITLQCRIKQIINMWQGVGRAMYAPPIAGNITCRSNITGLLLTRDGGINNVSNETETFRPAGGDMRDNWRSELYKYKVVEVQPLGIAPTGAKRRVVEREKRAAGLGALFLGFLGAAGSTMGAASITLTVQARQLLSGIVQQQSNLLRAIEAQQHMLQLTVWGIKQLQARVLTLERYAKDQQLLGMWGCSGKLICTTNVPWNTSWSNKSEMDIWNNMTWMQWEREISNYTETIYMLLEDSQRQQERNEKDLLALDSWNSLWNWFNITNWLWYIKIFIMIVGGLIGLRIVFAVLSIVNRVRQGY

SEQ ID NO: 88 - protein, 817 aa, Artificial Sequence
  Description of Artificial Sequence: Synthetic polypeptide
MGSLQPLATLYLLGMLVASVLAAENLWVTVYYGVPVWKEAKTTLFCASDAKAYKKEVHNVWATHACVPTDPSPQELFLENVTENFNMWKNDMVDQMHEDIISLWCQSLKPCVKLTPLCVTLICSTATVNNRAVDEMKNCSFNTTTEIRDKKKKEYALFYRSDVVPLDETNNTSEYRLINCNTSAVTQACPKVTFEPIPIHYCAPAGYAILKCNNETFNGTGPCSNVSTVQCTHGIRPVVSTQLLLNGSLAEKEIVIRSENLTNNAKIIIVHLNTSVEIVCTRPNNNTRKSVRIGPGQTFYATGDIIGDIKQAHCNISEEKWNETLQKVGIELQKHFPNKTIKYNQSAGGDMEITTHSFNCGGEFFYCNTSKLFNSTYNGTYISTNSTNSTSYITLQCRIKQIINMWQGCGVGRAMYAPPIAGNITCRSNITGLLLTRDGGINNVSNETETFRPAGGDMRDNWRSELYKYKVVKIEPLGVAPTRCKRRVVGRRRRRRAVGIGAVFLGFLGAAGSTMGAASMTLTVQARNLLSGIVQQQSNLLRAPEAQQHLLKLTVWGIKQLQARVLAVERYLRDQQLLGIWGCSGKLICCTNVPWNSSWSNRNLSEIWDNMTWLQWDKEISNYTQIIYGLLEESQNQQEKNEQDLLALDGGGSGDIIKLLNEQVNKEMNSSNLYMSMSSWCYTHSLDGAGLFLFDHAAEEYEHAKKLIIFLNENNVPVQLTSISAPEHKFEGLTQIFQKAYEHEQHISESINNIVDHAIKSKDHATFNFLQWYVAEQHEEEVLFKDILDKIELIGNENHGLYLADQYVKGIAKSRKS

SEQ ID NO: 89 - protein, 815 aa, Artificial Sequence
  Description of Artificial Sequence: Synthetic polypeptide
MGSLQPLATLYLLGMLVASVLAAENLWVTVYYGVPVWKEACTTLFCASDAKAYKKKVRNVWATHCCVPTDPSPQELFLENVTENFNMWKNDMVDQMHEDIISLWDQSLKPCVKLTPLCVTLICSTATVNNRAVDEMKNCSFNTTTEIRDKKKKEYALFYRSDVVPLDETNNTSEYRLINCNTSACTQACPKVTFEPIPIHYCAPAGYAILKCNNETFNGTGPCSNVSTVQCTHGIRPVVSTQLLLNGSLAEKEIVIRSENLTNNAKIIIVHLNTSVEIVCTRPNNNTRKSVRIGPGQWFYATGDIIGDIKQAHCNISEEKWNETLQKVGIELQKHFPNKTIKYNQSAGGDMEITTHSFNCGGEFFYCNTSKLFNSTYNGTYISTNSTNSTSYITLQCRIKQIINMWQGVGRCMYAPPIAGNITCRSNITGLLLTRDGGINNVSNETETFRPAGGDMRDNWRSELYKYKVVKIEPLGVAPTRCKRRVVGRRRRRRAVGIGAVFLGFLGAAGSTMGAASMTLTVQARNLLSGIVQQQSNCLRAPECQQHLLKLTVWGIKQLQARVLAVERYLRDQQLLGIWGCSGKLICCTNVPWNSSWSNRNLSEIWDNMTWLQWDKEISNYTQIIYGLLEESQNQQEKNEQDLLALDGGGSGDIIKLLNEQVNKEMNSSNLYMSMSSWCYTHSLDGAGLFLFDHAAEEYEHAKKLIIFLNENNVPVQLTSISAPEHKFEGLTQIFQKAYEHEQHISESINNIVDHAIKSKDHATFNFLQWYVAEQHEEEVLFKDILDKIELIGNENHGLYLADQYVKGIAKSRKS

SEQ ID NO: 90 - protein, 815 aa, Artificial Sequence
  Description of Artificial Sequence: Synthetic polypeptide
MGSLQPLATLYLLGMLVASVLAAENLWVTVYYGVPVWKEAKTTLFCASDAKAYKKEVHNIWATHACVPTDPSPQELFLENVTENFNMWKNDMVDQMHEDIISLWDQSLKPCVKLTPLCVTLICSTATVNNRAVDEMKNCSFNTTTEIRDKKKKEYALFYRSDVVPLDETNNTSEYRLINCNTSAVTMVCPKLTFEPIPIHYCAPAGYAILKCNNETFNGTGPCSNVSTVQCTHGIRPVLSTQLLLNGSLAEKEIVIRSENLTNNAKIIIVHLNTSVEIVCTRPLNLTRKSVRIGPGQTFYAMGDIIGDIKQAHCNISEEKWNETLQKVGIELQKHFPNKTIKYNQSAGGDMEITTHSFNCGGEFFYCNTSKLFNSTYNGTYISTNSTNSTSYITLQCRIKMIINMWQGVGRAMYAPPIAGNITCRSNITGLLLTRDGGINNVSNETETFRPAGGDMRDNWRSELYKYKVVKIEPLGVAPTRCKRRVVGRRRRRRAVGIGAVFLGFLGAAGSTMGAASMTLTVQARNLLSGIVQQQSNLLRAPEAQQHLLKLTVWGIKQLQARVLAVERYLRDQQLLGIWGCSGKLICCTNVPWNSSWSNRNLSEIWDNMTWLQWDKEISNYTQIIYGLLEESQNQQEKNEQDLLALDGGGSGDIIKLLNEQVNKEMNSSNLYMSMSSWCYTHSLDGAGLFLFDHAAEEYEHAKKLIIFLNENNVPVQLTSISAPEHKFEGLTQIFQKAYEHEQHISESINNIVDHAIKSKDHATFNFLQWYVAEQHEEEVLFKDILDKIELIGNENHGLYLADQYVKGIAKSRKS

SEQ ID NO: 91 - protein, 815 aa, Artificial Sequence
  Description of Artificial Sequence: Synthetic polypeptide
MGSLQPLATLYLLGMLVASVLAAENLWVTVYYGVPVWKEACTTLFCASDAKAYKKKVRNVWATHCCVPTDPSPQELFLENVTENFNMWKNDMVDQMHEDIISLWDQSLKPCVKLTPLCVTLICSTATVNNRAVDEMKNCSFNTTTEIRDKKKKEYALFYRSDVVPLDETNNTSEYRLINCNTSAVTQACPKVTFEPIPIHYCAPAGYAILKCNNETFNGTGPCSNVSTVQCTHGIRPVVSTQLLLNGSLAEKEIVIRSENLTNNAKIIIVHLNTSVEIVCTRPNNNTRKSVRIGPGQWFYATGDIIGDIKQAHCNISEEKWNETLQKVGIELQKHFPNKTIKYNQSAGGDMEITTHSFNCGGEFFYCNTSKLFNSTYNGTYISTNSTNSTSYITLQCRIKQIINMWQGVGRAMYAPPIAGNITCRSNITGLLLTRDGGINNVSNETETFRPAGGDMRDNWRSELYKYKVVKIEPLGVAPTRCKRRVVGRRRRRRAVGIGAVFLGFLGAAGSTMGAASMTLTVQARNLLSGIVQQQSNCLRAPECQQHLLKLTVWGIKQLQARVLAVERYLRDQQLLGIWGCSGKLICCTNVPWNSSWSNRNLSEIWDNMTWLQWDKEISNYTQIIYGLLEESQNQQEKNEQDLLALDGGGSGDIIKLLNEQVNKEMNSSNLYMSMSSWCYTHSLDGAGLFLFDHAAEEYEHAKKLIIFLNENNVPVQLTSISAPEHKFEGLTQIFQKAYEHEQHISESINNIVDHAIKSKDHATFNFLQWYVAEQHEEEVLFKDILDKIELIGNENHGLYLADQYVKGIAKSRKS

SEQ ID NO: 92 - protein, 815 aa, Artificial Sequence
  Description of Artificial Sequence: Synthetic polypeptide
MGSLQPLATLYLLGMLVASVLAAENLWVTVYYGVPVWKEAKTTLFCASDAKAYKKEVHNVWATHACVPTDPSPQELFLENVTENFNMWKNDMVDQMHEDIISLWDQSLKPCVKLTPLCVTLICSTATVNNRAVDEMKNCSFNTTTEIRDKKKKEYALFYRSDVVPLDETNNTSEYRLINCNTSACTQACPKVTFEPIPIHYCAPAGYAILKCNNETFNGTGPCSNVSTVQCTHGIRPVVSTQLLLNGSLAEKEIVIRSENLTNNAKIIIVHLNTSVEIVCTRPNNNTRKSVRIGPGQTFYATGDIIGDIKQAHCNISEEKWNETLQKVGIELQKHFPNKTIKYNQSAGGDMEITTHSFNCGGEFFYCNTSKLFNSTYNGTYISTNSTNSTSYITLQCRIKQIINMWQGVGRCMYAPPIAGNITCRSNITGLLLTRDGGINNVSNETETFRPAGGDMRDNWRSELYKYKVVKIEPLGVAPTRCKRRVVGRRRRRRAVGIGAVFLGFLGAAGSTMGAASMTLTVQARNLLSGIVQQQSNLLRAPEAQQHLLKLTVWGIKQLQARVLAVERYLRDQQLLGIWGCSGKLICCTNVPWNSSWSNRNLSEIWDNMTWLQWDKEISNYTQIIYGLLEESQNQQEKNEQDLLALDGGGSGDIIKLLNEQVNKEMNSSNLYMSMSSWCYTHSLDGAGLFLFDHAAEEYEHAKKLIIFLNENNVPVQLTSISAPEHKFEGLTQIFQKAYEHEQHISESINNIVDHAIKSKDHATFNFLQWYVAEQHEEEVLFKDILDKIELIGNENHGLYLADQYVKGIAKSRKS

SEQ ID NO: 93 - protein, 817 aa, Artificial Sequence
  Description of Artificial Sequence: Synthetic polypeptide
MPMGSLQPLATLYLLGMLVASVLAAENLWVTVYYGVPVWKEAKTTLFCASDAKAYKKEVHNIWATHACVPTDPSPQELFLENVTENFNMWKNDMVDQMHEDIISLWDQSLKPCVKLTPLCVTLICSTATVNNRAVDEMKNCSFNTTTEIRDKKKKEYALFYRSDVVPLDETNNTSEYRLINCNTSAVTQVCPKLTFEPIPIHYCAPAGYAILKCNNETFNGTGPCSNVSTVQCTHGIRPVLSTQLLLNGSLAEKEIVIRSENLTNNAKIIIVHLNTSVEIVCTRPNNNTRKSVRIGPGQTFYATGDIIGDIKQAHCNISEEKWNETLQKVGIELQKHFPNKTIKYNQSAGGDMEITTHSFNCGGEFFYCNTSKLFNSTYNGTYISTNSTNSTSYITLQCRIKQIINMWQGVGRAMYAPPIAGNITCRSNITGLLLTRDGGINNVSNETETFRPAGGDMRDNWRSELYKYKVVKIEPLGVAPTRCKRRVVGRRRRRRAVGIGAVFLGFLGAAGSTMGAASMTLTVQARNLLSGIVQQQSNLLRAPEAQQHLLKLTVWGIKQLQARVLAVERYLRDQQLLGIWGCSGKLICCTNVPWNSSWSNRNLSEIWDNMTWLQWDKEISNYTQIIYGLLEESQNQQEKNEQDLLALDGGGSGDIIKLLNEQVNKEMNSSNLYMSMSSWCYTHSLDGAGLFLFDHAAEEYEHAKKLIIFLNENNVPVQLTSISAPEHKFEGLTQIFQKAYEHEQHISESINNIVDHAIKSKDHATFNFLQWYVAEQHEEEVLFKDILDKIELIGNENHGLYLADQYVKGIAKSRKS

SEQ ID NO: 94 - protein, 808 aa, Artificial Sequence
  Description of Artificial Sequence: Synthetic polypeptide
MPMGSLQPLATLYLLGMLVASVLAEGNLWVTVYYGVPVWKEAKTTLFCASDAKAYKKEVHNVWATHACVPTDPSPQELFLENVTENFNMWKNDMVDQMHEDIISLWDQSLKPCVKLTPLCVTLICSTATVNNRAVDEMKNCSFNTTTEIRDKKKKEYALFYRSDVVPLDETNNTSEYRLINCNTSACTQACPKVTFEPIPIHYCAPAGYAILKCNNETFNGTGPCSNVSTVQCTHGIRPVVSTQLLLNGSLAEKEIVIRSENLTNNAKIIIVHLNTSVEIVCTRPNNNTRKSVRIGPGQTFYATGDIIGDIKQAHCNISEEKWNETLQKVGIELQKHFPNKTIKYNQSAGGDMEITTHSFNCGGEFFYCNTSKLFNSTYNGTYISTNSTNSTSYITLQCRIKQIINMWQGVGRCMYAPPIAGNITCRSNITGLLLTRDGGINNVSNETETFRPAGGDMRDNWRSELYKYKVVEVQPLGIAPTGCKRRVVEGGGGSGGGGSAVGIGAVFLGFLGAAGSTMGAASMTLTVQARNLLSGNPDWLPDMTVWGIKQLQARVLAVERYLRDQQLLGIWGCSGKLICCTNVPWNSSWSNRNLSEIWDNMTWLQWDKEISNYTQIIYGLLEESQNQQEKNEQDLLALDGGGSGDIIKLLNEQVNKEMNSSNLYMSMSSWCYTHSLDGAGLFLFDHAAEEYEHAKKLIIFLNENNVPVQLTSISAPEHKFEGLTQIFQKAYEHEQHISESINNIVDHAIKSKDHATFNFLQWYVAEQHEEEVLFKDILDKIELIGNENHGLYLADQYVKGIAKSRKS

SEQ ID NO: 95 - protein, 817 aa, Artificial Sequence
  Description of Artificial Sequence: Synthetic polypeptide
MPMGSLQPLATLYLLGMLVASVLAAENLWVTVYYGVPVWKEAKTTLFCASDAKAYKKEVANVWATHACVPTDPSPQELFLENVTENFNMWKNDMVDQMHEDIISLWDQSLKPCVKLTPLCVTLICSTATVNNRAVDEMKNCSFNTTTEIRDKKKKEYALFYRSDVVPLDETNNTSEYRLINCNTSAVTQACPKVTFEPIPIHYCAPAGYAILKCNNETFNGTGPCSNVSTVQCTHGIRPVVSTQLLLNGSLAEKEIVIRSENLTNNAKIIIVHLNTSVEIVCTRPNNNTRKSVRIGPGQTFYATGDIIGDIKQAHCNISEEKWNETLQKVGIELQKHFPNKTIKYNQSAGGDMEITTHSFNCGGEFFYCNTSKLFNSTYNGTYISTNSTNSTSYITLQCRIKQIINMWQGVGRAMYAPPIAGNITCRSNITGLLLTRDGGINNVSNETETFRPAGGDMRDNWRSELYKYKVVKIEPLGVAPTRCKRRVVGRRRRRRAVGIGAVFLGFLGAAGSTMGAASMTLTVQARNLLSGIVQQQSNLLRAPEAQQHLLKLTVWGIKQLQARVLTVERYARDQQLLGIWGCSGKLICCTNVPWNSSWSNRNLSEIWDNMTWLQWDKEISNYTQIIYGLLEESQNQQEKNEQDLLALDGGGSGDIIKLLNEQVNKEMNSSNLYMSMSSWCYTHSLDGAGLFLFDHAAEEYEHAKKLIIFLNENNVPVQLTSISAPEHKFEGLTQIFQKAYEHEQHISESINNIVDHAIKSKDHATFNFLQWYVAEQHEEEVLFKDILDKIELIGNENHGLYLADQYVKGIAKSRKS

SEQ ID NO: 96 - DNA, 2454 bp, Artificial Sequence
  Description of Artificial Sequence: Synthetic polynucleotide
atgcctatgggatctctgcagcctctggccacactgtacctgctgggaatgctggtggcttctgtgctggccgccgagaatctgtgggtcacagtgtactatggcgtgcccgtgtggaaagaggccaagaccacactgttctgcgcctccgatgccagagcctacgagaaagaggtgcacaacgtctgggccacacacgcctgtgtgcctaccgatccatctcctcaagagctggtgctgggcaacgtgaccgagaacttcaacatgtggaagaacgacatggtggaccagatgcacgaggacatcatcagcctgtgggaccagagcctgaagccttgcgtgaagctgacccctctgtgcgtgaccctgatctgttctgacgccaccgtgaaaaccggcaccgtggaagagatgaagaactgcagcttcaacaccaccaccgagatccgggacaagaagaagaaagagtacgccctgttctacaagcccgacatcgtgcccctgagcgagacaaacaacaccagcgagtaccggctgatcaactgcaacacctccgcctgcactcaggcctgtcctaaagtgaccttcgagcccattcctatccactactgtgcccctgccggctacgccatcctgaagtgcaacaacgagacattcaacggcacaggcccctgcagcaatgtgtccaccgtgcagtgtacccacggcatcagaccagtggtgtctacccagctgctgctgaatggaagcctggccgagaaagaaatcgtgatcagaagcgagaacctgaccaacaacgccaagatcatcatcgtccacctgaataccagcgtggaaatcgtgtgcacccggcctaacaacaacacccggaagtctgtgcggatcggccctggccagacattctatgccaccggcgatatcatcggcgacatcaaacaggcccactgtaacatcagcgaggaaaagtggaacgacaccctgcagaaagtgggcatcgagctgcagaagcacttccccaacaagaccatcaagtacaaccagagcgctggcggcgacatggaaatcaccacacacagcttcaattgtggcggcgagttcttctactgcaataccagcaacctgttcaacgggacctacaatggcacctacatcagcaccaacagcagcgccaactccaccagcaccatcactctgcagtgccggatcaagcagatcatcaatatgtggcaaggcgtcggccggtgtatgtacgcccctcctatcgccggcaacatcacctgtcggagcaatatcacaggcctgctgctcaccagagatggcggcaccaatagcaacgaaaccgaaaccttcagacctgccggcggagacatgagagacaattggagaagcgagctgtacaagtacaaggtggtcaagatcgagcccctgggcgtcgcacctacacggtgcaagagaagagtcgtgggccgtcgtagaaggcggagagccgttggaattggcgccgtgttcctgggctttctgggagccgctggatctacaatgggcgctgccagcatgaccctgacagtgcaggctagaaatctgctgagcggcatcgtgcagcagcagagcaatctgctcagagcccctgaggctcagcagcacctcctgaaactgacagtgtggggcatcaagcagctgcaggcaagagtgctggcagtggaaagatacctgcgggaccagcagctcctcggaatctggggatgtagcggcaagctgatctgctgcaccaacgtgccctggaacagctcctggtccaacagaaacctgtccgagatctgggataacatgacctggctgcagtgggacaaagagatcagcaactacacccagatcatctacggcctgctggaagagagccagaaccagcaagagaaaaacgagcaggacctgctggccctggattctggcggagacattatcaagctgctgaacgagcaagtgaacaaagaaatgcagtcctccaacctgtacatgagcatgagcagctggtgttacacccacagccttgatggcgccggactgttcctgtttgatcacgccgccgaggaatacgagcacgccaagaagctgatcatcttcctgaacgagaacaatgtgcccgtgcagctgaccagcattagcgccccagagcacaagttcgagggcctgacacagatctttcagaaggcctacgaacacgagcagcacatctccgagagcatcaacaacatcgtggaccacgccattaagagcaaggatcacgccaccttcaattttctgcagtggtacgtggccgaacagcacgaggaagaagtgctgttcaaggacatcctggacaagattgagctgatcggcaacgagaaccacggcctgtatctggccgaccagtacgtgaagggaatcgccaagagccggaagtccggctcctgatga

SEQ ID NO: 97 - DNA, 1968 bp, Artificial Sequence
  Description of Artificial Sequence: Synthetic polynucleotide
gtcgacgccaccatgcctatgggatctctgcagcctctggccacactgtacctgctgggaatgctggtggcttctgtgctggccgccgagaatctgtgggtcacagtgtactatggcgtgcccgtgtggaaagaggccaagaccacactgttctgcgcctccgatgccagagcctacgagaaagaggtgcacaacgtctgggccacacacgcctgtgtgcctaccgatccatctcctcaagagctggtgctgggcaacgtgaccgagaacttcaacatgtggaagaacgacatggtggaccagatgcacgaggacatcatcagcctgtgggaccagagcctgaagccttgcgtgaagctgacccctctgtgcgtgaccctgatctgttctgacgccaccgtgaaaaccggcaccgtggaagagatgaagaactgcagcttcaacaccaccaccgagatccgggacaagaagaagaaagagtacgccctgttctacaagcccgacatcgtgcccctgagcgagacaaacaacaccagcgagtaccggctgatcaactgcaacacctccgcctgcactcaggcctgtcctaaagtgaccttcgagcccattcctatccactactgtgcccctgccggctacgccatcctgaagtgcaacaacgagacattcaacggcacaggcccctgcagcaatgtgtccaccgtgcagtgtacccacggcatcagaccagtggtgtctacccagctgctgctgaatggaagcctggccgagaaagaaatcgtgatcagaagcgagaacctgaccaacaacgccaagatcatcatcgtccacctgaataccagcgtggaaatcgtgtgcacccggcctaacaacaacacccggaagtctgtgcggatcggccctggccagacattctatgccaccggcgatatcatcggcgacatcaagcaggcccactgcaacatcagcgaggaaaagtggaacgacaccctgcagaaagtgggcatcgagctgcagaagcacttccccaacaagaccatcaagtacaaccagagcgctggcggcgacatggaaatcaccacacacagcttcaattgtggcggcgagttcttctactgcaataccagcaacctgttcaacgggacctacaatggcacctacatcagcaccaacagcagcgccaactccaccagcaccatcactctgcagtgccggatcaagcagatcatcaatatgtggcaaggcgtcggccggtgtatgtacgcccctcctatcgccggcaacatcacctgtcggagcaatatcacaggcctgctgctcaccagagatggcggcaccaatagcaacgaaaccgaaaccttcagacctgccggcggagacatgagagacaattggagaagcgagctgtacaagtacaaggtggtcaagatcgagcccctgggcgtcgcacctacacggtgcaagagaagagtcgtgggccgtcgtagaaggcggagagccgttggaattggcgccgtgttcctgggctttctgggagccgctggatctacaatgggcgctgccagcatgaccctgacagtgcaggctagaaatctgctgagcggcatcgtgcagcagcagagcaatctgctcagagcccctgaggctcagcagcacctcctgaaactgacagtgtggggaatcaagcagctgcaggccagagtgctggcagtggaaagatacctgagggaccagcagctcctcggaatctggggctgttctggcaagctgatctgctgcaccaacgtgccctggaacagctcctggtccaacagaaacctgtccgagatctgggataacatgacctggctgcagtgggacaaagagatcagcaactacacccagatcatctacggcctgctggaagagagccagaaccagcaagagaaaaacgagcaggacctgctggccctggattgatgaggatcc

SEQ ID NO: 98 - DNA, 1968 bp, Artificial Sequence
  Description of Artificial Sequence: Synthetic polynucleotide
gtcgacgccaccatgcctatgggatctctgcagcctctggccacactgtacctgctgggaatgctggtggcttctgtgctggccgccgagaatctgtgggtcacagtgtactatggcgtgcccgtgtggaaagaggccaagaccacactgttctgcgcctccgatgccagagcctacgagaaagaggtgcacaacgtctgggccacacacgcctgtgtgcctaccgatccatctcctcaagagctggtgctgggcaacgtgaccgagaacttcaacatgtggaagaacgacatggtggaccagatgcacgaggacatcatcagcctgtgggaccagagcctgaagccttgcgtgaagctgacccctctgtgcgtgaccctgatctgttctaacgccaccgtgaaaaacggcaccgtggaagagatgaagaactgcagcttcaacaccaccaccgagatccgggacaagaagaagaaagagtacgccctgttctacaagcccgacatcgtgcccctgagcgagacaaacaacaccagcgagtaccggctgatcaactgcaacacctccgcctgcactcaggcctgtcctaaagtgaccttcgagcccattcctatccactactgtgcccctgccggctacgccatcctgaagtgcaacaacgagacattcaacggcacaggcccctgcagcaatgtgtccaccgtgcagtgtacccacggcatcagaccagtggtgtctacccagctgctgctgaatggaagcctggccgagaaagaaatcgtgatcagaagcgagaacctgaccaacaacgccaagatcatcatcgtccacctgaataccagcgtggaaatcgtgtgcacccggcctaacaacaacacccggaagtctgtgcggatcggccctggccagacattctatgccaccggcgatatcatcggcgacatcaagcaggcccactgcaacatcagcgaggaaaagtggaacgacaccctgcagaaagtgggcatcgagctgcagaagcacttccccaacaagaccatcaagtacaaccagagcgctggcggcgacatggaaatcaccacacacagcttcaattgtggcggcgagttcttctactgcaataccagcaacctgttcaacgggacctacaatggcacctacatcagcaccaacagcagcgccaactccaccagcaccatcactctgcagtgccggatcaagcagatcatcaatatgtggcaaggcgtcggccggtgtatgtacgcccctcctatcgccggcaacatcacctgtcggagcaatatcacaggcctgctgctcaccagagatggcggcaccaatagcaacgaaaccgaaaccttcagacctgccggcggagacatgagagacaattggagaagcgagctgtacaagtacaaggtggtcaagatcgagcccctgggcgtcgcacctacacggtgcaagagaagagtcgtgggccgtcgtagaaggcggagagccgttggaattggcgccgtgttcctgggctttctgggagccgctggatctacaatgggcgctgccagcatgaccctgacagtgcaggctagaaatctgctgagcggcatcgtgcagcagcagagcaatctgctcagagcccctgaggctcagcagcacctcctgaaactgacagtgtggggaatcaagcagctgcaggccagagtgctggcagtggaaagatacctgagggaccagcagctcctcggaatctggggctgttctggcaagctgatctgctgcaccaacgtgccctggaacagctcctggtccaacagaaacctgtccgagatctgggataacatgacctggctgcagtgggacaaagagatcagcaactacacccagatcatctacggcctgctggaagagagccagaaccagcaagagaaaaacgagcaggacctgctggccctggattgatgaggatcc

SEQ ID NO: 99 - DNA, 2472 bp, Artificial Sequence
  Description of Artificial Sequence: Synthetic polynucleotide
gtcgacgccaccatgcctatgggatctctgcagcctctggccacactgtacctgctgggaatgctggtggcttctgtgctggccgccgagaatctgtgggtcacagtgtactatggcgtgcccgtgtggaaagaggccaagaccacactgttctgcgcctccgatgccagagcctacgagaaagaggtgcacaacgtctgggccacacacgcctgtgtgcctaccgatccatctcctcaagagctggtgctgggcaacgtgaccgagaacttcaacatgtggaagaacgacatggtggaccagatgcacgaggacatcatcagcctgtgggaccagagcctgaagccttgcgtgaagctgacccctctgtgcgtgaccctgatctgttctaacgccaccgtgaaaaacggcaccgtggaagagatgaagaactgcagcttcaacaccaccaccgagatccgggacaagaagaagaaagagtacgccctgttctacaagcccgacatcgtgcccctgagcgagacaaacaacaccagcgagtaccggctgatcaactgcaacacctccgcctgcactcaggcctgtcctaaagtgaccttcgagcccattcctatccactactgtgcccctgccggctacgccatcctgaagtgcaacaacgagacattcaacggcacaggcccctgcagcaatgtgtccaccgtgcagtgtacccacggcatcagaccagtggtgtctacccagctgctgctgaatggaagcctggccgagaaagaaatcgtgatcagaagcgagaacctgaccaacaacgccaagatcatcatcgtccacctgaataccagcgtggaaatcgtgtgcacccggcctaacaacaacacccggaagtctgtgcggatcggccctggccagacattctatgccaccggcgatatcatcggcgacatcaaacaggcccactgtaacatcagcgaggaaaagtggaacgacaccctgcagaaagtgggcatcgagctgcagaagcacttccccaacaagaccatcaagtacaaccagagcgctggcggcgacatggaaatcaccacacacagcttcaattgtggcggcgagttcttctactgcaataccagcaacctgttcaacgggacctacaatggcacctacatcagcaccaacagcagcgccaactccaccagcaccatcactctgcagtgccggatcaagcagatcatcaatatgtggcaaggcgtcggccggtgtatgtacgcccctcctatcgccggcaacatcacctgtcggagcaatatcacaggcctgctgctcaccagagatggcggcaccaatagcaacgaaaccgaaaccttcagacctgccggcggagacatgagagacaattggagaagcgagctgtacaagtacaaggtggtcaagatcgagcccctgggcgtcgcacctacacggtgcaagagaagagtcgtgggccgtcgtagaaggcggagagccgttggaattggcgccgtgttcctgggctttctgggagccgctggatctacaatgggcgctgccagcatgaccctgacagtgcaggctagaaatctgctgagcggcatcgtgcagcagcagagcaatctgctcagagcccctgaggctcagcagcacctcctgaaactgacagtgtggggcatcaagcagctgcaggcaagagtgctggcagtggaaagatacctgcgggaccagcagctcctcggaatctggggatgtagcggcaagctgatctgctgcaccaacgtgccctggaacagctcctggtccaacagaaacctgtccgagatctgggataacatgacctggctgcagtgggacaaagagatcagcaactacacccagatcatctacggcctgctggaagagagccagaaccagcaagagaaaaacgagcaggacctgctggccctggattctggcggagacattatcaagctgctgaacgagcaagtgaacaaagaaatgcagtcctccaacctgtacatgagcatgagcagctggtgttacacccacagccttgatggcgccggactgttcctgtttgatcacgccgccgaggaatacgagcacgccaagaagctgatcatcttcctgaacgagaacaatgtgcccgtgcagctgaccagcattagcgccccagagcacaagttcgagggcctgacacagatctttcagaaggcctacgaacacgagcagcacatctccgagagcatcaacaacatcgtggaccacgccattaagagcaaggatcacgccaccttcaattttctgcagtggtacgtggccgaacagcacgaggaagaagtgctgttcaaggacatcctggacaagattgagctgatcggcaacgagaaccacggcctgtatctggccgaccagtacgtgaagggaatcgccaagagccggaagtccggctcctgatgaggatcc

SEQ ID NO: 100 - protein, 792 aa, Artificial Sequence
  Description of Artificial Sequence: Synthetic polypeptide
AENLWVTVYYGVPVWKEAKTTLFCASDARAYEKEVHNVWATHACVPTDPSPQELVLGNVTENFNMWKNDMVDQMHEDIISLWDQSLKPCVKLTPLCVTLICSDATVKTGTVEEMKNCSFNTTTEIRDKKKKEYALFYKPDIVPLSETNNTSEYRLINCNTSACTQACPKVTFEPIPIHYCAPAGYAILKCNNETFNGTGPCSNVSTVQCTHGIRPVVSTQLLLNGSLAEKEIVIRSENLTNNAKIIIVHLNTSVEIVCTRPNNNTRKSVRIGPGQTFYATGDIIGDIKQAHCNISEEKWNDTLQKVGIELQKHFPNKTIKYNQSAGGDMEITTHSFNCGGEFFYCNTSNLFNGTYNGTYISTNSSANSTSTITLQCRIKQIINMWQGVGRCMYAPPIAGNITCRSNITGLLLTRDGGTNSNETETFRPAGGDMRDNWRSELYKYKVVKIEPLGVAPTRCKRRVVGRRRRRRAVGIGAVFLGFLGAAGSTMGAASMTLTVQARNLLSGIVQQQSNLLRAPEAQQHLLKLTVWGIKQLQARVLAVERYLRDQQLLGIWGCSGKLICCTNVPWNSSWSNRNLSEIWDNMTWLQWDKEISNYTQIIYGLLEESQNQQEKNEQDLLALDSGGDIIKLLNEQVNKEMQSSNLYMSMSSWCYTHSLDGAGLFLFDHAAEEYEHAKKLIIFLNENNVPVQLTSISAPEHKFEGLTQIFQKAYEHEQHISESINNIVDHAIKSKDHATFNFLQWYVAEQHEEEVLFKDILDKIELIGNENHGLYLADQYVKGIAKSRKSGS

SEQ ID NO: 101 - protein, 624 aa, Artificial Sequence
  Description of Artificial Sequence: Synthetic polypeptide
AENLWVTVYYGVPVWKEAKTTLFCASDARAYEKEVHNVWATHACVPTDPSPQELVLGNVTENFNMWKNDMVDQMHEDIISLWDQSLKPCVKLTPLCVTLICSDATVKTGTVEEMKNCSFNTTTEIRDKKKKEYALFYKPDIVPLSETNNTSEYRLINCNTSACTQACPKVTFEPIPIHYCAPAGYAILKCNNETFNGTGPCSNVSTVQCTHGIRPVVSTQLLLNGSLAEKEIVIRSENLTNNAKIIIVHLNTSVEIVCTRPNNNTRKSVRIGPGQTFYATGDIIGDIKQAHCNISEEKWNDTLQKVGIELQKHFPNKTIKYNQSAGGDMEITTHSFNCGGEFFYCNTSNLFNGTYNGTYISTNSSANSTSTITLQCRIKQIINMWQGVGRCMYAPPIAGNITCRSNITGLLLTRDGGTNSNETETFRPAGGDMRDNWRSELYKYKVVKIEPLGVAPTRCKRRVVGRRRRRRAVGIGAVFLGFLGAAGSTMGAASMTLTVQARNLLSGIVQQQSNLLRAPEAQQHLLKLTVWGIKQLQARVLAVERYLRDQQLLGIWGCSGKLICCTNVPWNSSWSNRNLSEIWDNMTWLQWDKEISNYTQIIYGLLEESQNQQEKNEQDLLALD

SEQ ID NO: 102 - protein, 624 aa, Artificial Sequence
  Description of Artificial Sequence: Synthetic polypeptide
AENLWVTVYYGVPVWKEAKTTLFCASDARAYEKEVHNVWATHACVPTDPSPQELVLGNVTENFNMWKNDMVDQMHEDIISLWDQSLKPCVKLTPLCVTLICSNATVKNGTVEEMKNCSFNTTTEIRDKKKKEYALFYKPDIVPLSETNNTSEYRLINCNTSACTQACPKVTFEPIPIHYCAPAGYAILKCNNETFNGTGPCSNVSTVQCTHGIRPVVSTQLLLNGSLAEKEIVIRSENLTNNAKIIIVHLNTSVEIVCTRPNNNTRKSVRIGPGQTFYATGDIIGDIKQAHCNISEEKWNDTLQKVGIELQKHFPNKTIKYNQSAGGDMEITTHSFNCGGEFFYCNTSNLFNGTYNGTYISTNSSANSTSTITLQCRIKQIINMWQGVGRCMYAPPIAGNITCRSNITGLLLTRDGGTNSNETETFRPAGGDMRDNWRSELYKYKVVKIEPLGVAPTRCKRRVVGRRRRRRAVGIGAVFLGFLGAAGSTMGAASMTLTVQARNLLSGIVQQQSNLLRAPEAQQHLLKLTVWGIKQLQARVLAVERYLRDQQLLGIWGCSGKLICCTNVPWNSSWSNRNLSEIWDNMTWLQWDKEISNYTQIIYGLLEESQNQQEKNEQDLLALD

SEQ ID NO: 103 - protein, 792 aa, Artificial Sequence
  Description of Artificial Sequence: Synthetic polypeptide
AENLWVTVYYGVPVWKEAKTTLFCASDARAYEKEVHNVWATHACVPTDPSPQELVLGNVTENFNMWKNDMVDQMHEDIISLWDQSLKPCVKLTPLCVTLICSNATVKNGTVEEMKNCSFNTTTEIRDKKKKEYALFYKPDIVPLSETNNTSEYRLINCNTSACTQACPKVTFEPIPIHYCAPAGYAILKCNNETFNGTGPCSNVSTVQCTHGIRPVVSTQLLLNGSLAEKEIVIRSENLTNNAKIIIVHLNTSVEIVCTRPNNNTRKSVRIGPGQTFYATGDIIGDIKQAHCNISEEKWNDTLQKVGIELQKHFPNKTIKYNQSAGGDMEITTHSFNCGGEFFYCNTSNLFNGTYNGTYISTNSSANSTSTITLQCRIKQIINMWQGVGRCMYAPPIAGNITCRSNITGLLLTRDGGTNSNETETFRPAGGDMRDNWRSELYKYKVVKIEPLGVAPTRCKRRVVGRRRRRRAVGIGAVFLGFLGAAGSTMGAASMTLTVQARNLLSGIVQQQSNLLRAPEAQQHLLKLTVWGIKQLQARVLAVERYLRDQQLLGIWGCSGKLICCTNVPWNSSWSNRNLSEIWDNMTWLQWDKEISNYTQIIYGLLEESQNQQEKNEQDLLALDSGGDIIKLLNEQVNKEMQSSNLYMSMSSWCYTHSLDGAGLFLFDHAAEEYEHAKKLIIFLNENNVPVQLTSISAPEHKFEGLTQIFQKAYEHEQHISESINNIVDHAIKSKDHATFNFLQWYVAEQHEEEVLFKDILDKIELIGNENHGLYLADQYVKGIAKSRKSGS

SEQ ID NO: 104 - DNA, 1989 bp, Artificial Sequence
  Description of Artificial Sequence: Synthetic polynucleotide
gtcgacgccaccatgcctatgggatctctgcaacctctggccacactgtacctgctgggaatgctggtggcttctgtgctggccgccgagaatctgtgggtcacagtgtactatggcgtgcccgtgtgggaagatgccgacacacctctgttttgtgccagcgacgccaaggcctacagcaccgagtctcacaatgtgtgggccactcacgcctgcgtgccaaccgatccatctcctcaagagatcagcctggacaacgtgaccgagaacttcaacatgtggaagaacaacatggtcgagcagatgcacgaggacatcatcagcctgtgggacgagagcctgaagccttgcgtgaagctgacccctctgtgcgtgaccctgaactgcaccaacgtgaacaacagcagcgccaccaacaactccatggtggacgatagagagggcctgaagaactgcagcttcaacatcaccaccgagctgcgggacaagaagaagcaagagcacgccctgttctaccggctggacatcgtgcccatcaacggcaacagcaactccaacagctccgtgggcgactacagactgatcaactgcaacgtgtccacatgcaagcaggcctgtcctaagatgagcttcgaccccattcctatccactactgtgcccctgccggcttcgccatcctgaagtgcagagacaagaagttcaacggcaccggcagctgcaagaatgtgtccaccgtgcagtgtacccacggcatcaagcctgtgatcagcacccagctgctgctgaatggctctgtggccgaagaggaaatcatgatccgcagcgagaactttaccaacaacgccaagaacatcatcgtccagttcaacaagaccatcgacatcatgtgcacccggcctaacaacaacacccggaagtccatcagcctcggacctggacaggccatctatgccaccggcgacatcatcggcaatatcagacaggcccactgcaacatctctggcgccgactggggcaacatgatcagaaatgtgtccgagaagctgaaagagatcttcaacaaaaccaccatcaccttcaaggcctccgctggcggcgacctggaaatcaccacacacagcttcaattgcaggggcgagttcttctactgcgacaccagcgacctgttcaactccagcagattcaacaatagcagcaacgacacgaacgacaccatcacactgccctgcaagatcaagcagatcgtgcggatgtggcagcgcgtgggccagtgtatgtatgcccctcctatcgccggcaacatcacatgcagaagcaatatcaccggcctgctgctcaccagagatggcggcggaaacaacaccaacgagacagaaaccttccggcctgccggcggagacatgagagacaattggagaagcgagctgtacaagtacaaggtggtcaagatcgagcccctgggcgtcgcacctacacggtgcaagagaagagtcgtgggccgtcgtagaaggcggagagccgttggaattggcgccgtgttcctgggctttctgggagccgctggatctacaatgggcgctgccagcatgaccctgacagtgcaggctagaaatctgctgagcggcatcgtgcagcagcagagcaatctgctcagagcccctgaggctcagcagcacctcctgaaactgacagtgtggggaatcaagcagctgcaggccagagtgctggctgtggaaagatacctgagggaccagcagctcctcggaatctggggctgttctggcaagctgatctgctgcaccaatgtgccctggaacagctcctggtccaaccggaatctgagcgagatctgggacaatatgacctggctgcagtgggacaaagagattagcaactacacccagatcatctacggactgctggaagagagccagaaccagcaagagaaaaacgagcaggacctgctggccctggactgataaggatcc

SEQ ID NO: 105 - DNA, 1989 bp, Artificial Sequence
  Description of Artificial Sequence: Synthetic polynucleotide
gtcgacgccaccatgcctatgggatctctgcagcctctggccacactgtacctgctgggaatgctggtggctagcgtgctggcctccaacaatctgtgggtcaccgtgtactacggcgtgcccgtttgggaagatgccgacacacctctgttctgtgcctccgatgccaaggcctacagcaccgagtctcacaacgtgtgggccactcatgcctgcgtgccaaccgatccatctcctcaagagatcagcctggacaacgtgaccgagaacttcaacatgtggaagaacaacatggtcgagcagatgcacgaggacatcatcagcctgtgggacgagagcctgaagccttgcgtgaagctgacccctctgtgcgtgaccctgaactgcaccaacgtgaacaacagcagcgccaccaacaactccatggtggacgatagagagggcctgaagaactgcagcttcaacatcaccaccgagctgcgggacaagaagaagcaagagcacgccctgttctaccggctggacatcgtgcccatcaacggcaacagcaactccaacagctccgtgggcgactacagactgatcaactgcaacgtgtccaccatcaagcaggcctgtcctaagatgagcttcgaccccattcctatccactactgtgcccctgccggcttcgccatcctgaagtgcagagacaagaagttcaacggcaccggcagctgcaagaatgtgtccaccgtgcagtgtacccacggcatcaagcctgtgatcagcacccagctgctgctgaatggctctgtggccgaagaggaaatcatgatccgcagcgagaactttaccaacaacgccaagaacatcatcgtccagttcaacaagaccatcgacatcatgtgcacccggcctaacaacaacacccggaagtccatcagcctcggacctggacaggccatctatgccaccggcgacatcatcggcaatatcagacaggcccactgcaacatctctggcgccgactggggcaacatgatcagaaatgtgtccgagaagctgaaagagatcttcaacaaaaccaccatcaccttcaaggcctccgctggcggcgacctggaaatcaccacacacagcttcaattgcaggggcgagttcttctactgcgacaccagcgacctgttcaactccagcagattcaacaatagcagcaacgacacgaacgacaccatcacactgccctgcaagatcaagcagatcgtgcggatgtggcagcgcgttggccaggctatgtatgcccctcctatcgccggcaacatcacatgcagaagcaatatcaccggcctgctgctcaccagagatggcggcggaaacaacaccaacgagacagaaaccttccggcctgccggcggagacatgagagacaattggagaagcgagctgtacaagtacaaggtggtcaagatcaaccctctgggcgtcgcccctaccagatgtagaagaagagtcgtcggcagacggcggaggcggagagctattggaatgggagctgtgctgctgggctttctgggaacagccggctctacaatgggagccgcctctatcaccctgaccgtgcaagttcgacagctgctgtctggcatcgtgcagcagcagagcaacctgctgagagcccctgaagctcagcagcatctcctgcagctgacagtgtggggaatcaagcagctccaggccagaatcctggccgtcgagagatacctgaaggaccagcagctcctcggaatctggggctgttctggcaagctgatctgctgcaccaatgtgccctggaacgccagctggtccaacagaagctacaacgacatctgggagaacctgacctgggtcgagtgggagagagagatctccaactacacccagcagatctacagcctgctggaagagagccagaaccagcaagagaagaacgagcaggacctgctggccctggactgataaggatcc

SEQ ID NO: 106 - DNA, 1989 bp, Artificial Sequence
  Description of Artificial Sequence: Synthetic polynucleotide
gtcgacgccaccatgcctatgggatctctgcagcctctggccacactgtacctgctgggaatgctggtggctagcgtgctggcctccaacaatctgtgggtcaccgtgtactacggcgtgcccgtttgggaagatgccgacacacctctgttctgtgcctccgatgccaaggcctacagcaccgagtctcacaacgtgtgggccactcatgcctgcgtgccaaccgatccatctcctcaagagatcagcctggacaacgtgaccgagaacttcaacatgtggaagaacaacatggtcgagcagatgcacgaggacatcatcagcctgtgggacgagagcctgaagccttgcgtgaagctgacccctctgtgcgtgaccctgaactgcaccaacgtgaacaacagcagcgccaccaacaactccatggtggacgatagagagggcctgaagaactgcagcttcaacatcaccaccgagctgcgggacaagaagaagcaagagcacgccctgttctaccggctggacatcgtgcccatcaacggcaacagcaactccaacagctccgtgggcgactacagactgatcaactgcaacgtgtccacctgcaagcaggcctgtcctaagatgagcttcgaccccattcctatccactactgtgcccctgccggcttcgccatcctgaagtgcagagacaagaagttcaacggcaccggcagctgcaagaatgtgtccaccgtgcagtgtacccacggcatcaagcctgtgatcagcacccagctgctgctgaatggctctgtggccgaagaggaaatcatgatccgcagcgagaactttaccaacaacgccaagaacatcatcgtccagttcaacaagaccatcgacatcatgtgcacccggcctaacaacaacacccggaagtccatcagcctcggacctggacaggccatctatgccaccggcgacatcatcggcaatatcagacaggcccactgcaacatctctggcgccgactggggcaacatgatcagaaatgtgtccgagaagctgaaagagatcttcaacaaaaccaccatcaccttcaaggcctccgctggcggcgacctggaaatcaccacacacagcttcaattgcaggggcgagttcttctactgcgacaccagcgacctgttcaactccagcagattcaacaatagcagcaacgacacgaacgacaccatcacactgccctgcaagatcaagcagatcgtgcggatgtggcagcgcgttggccagtgcatgtatgcccctcctatcgccggcaacatcacatgcagaagcaatatcaccggcctgctgctcaccagagatggcggcggaaacaacaccaacgagacagaaaccttccggcctgccggcggagacatgagagacaattggagaagcgagctgtacaagtacaaggtggtcaagatcaaccctctgggcgtcgcccctaccagatgtagaagaagagtcgtcggcagacggcggaggcggagagctattggaatgggagctgtgctgctgggctttctgggaacagccggctctacaatgggagccgcctctatcaccctgaccgtgcaagttcgacagctgctgtctggcatcgtgcagcagcagagcaacctgctgagagcccctgaagctcagcagcatctcctgcagctgacagtgtggggaatcaagcagctccaggccagaatcctggccgtcgagagatacctgaaggaccagcagctcctcggaatctggggctgttctggcaagctgatctgctgcaccaatgtgccctggaacgccagctggtccaacagaagctacaacgacatctgggagaacctgacctgggtcgagtgggagagagagatctccaactacacccagcagatctacagcctgctggaagagagccagaaccagcaagagaagaacgagcaggacctgctggccctggactgataaggatcc

SEQ ID NO: 107 - DNA, 1950 bp, Artificial Sequence
  Description of Artificial Sequence: Synthetic polynucleotide
gtcgacgccaccatgcctatgggatctctgcagcctctggccacactgtacctgctgggaatgctggtggctagcgtgctggcctccaacaatctgtgggtcaccgtgtactacggcgtgcccgtttgggaagatgccgacacacctctgttctgtgcctccgatgccaaggcctacagcaccgagtctcacaacgtgtgggccactcatgcctgcgtgccaaccgatccatctcctcaagagatcagcctggacaacgtgaccgagaacttcaacatgtggaagaacaacatggtcgagcagatgcacgaggacatcatcagcctgtgggacgagagcctgaagccttgcgtgaagctgacccctctgtgcgtgaccctgaactgcaccaacgtgaacaacagcagcgccaccaacaactccatggtggacgatagagagggcctgaagaactgcagcttcaacatcaccaccgagctgcgggacaagaagaagcaagagcacgccctgttctaccggctggacatcgtgcccatcaacggcaacagcaactccaacagctccgtgggcgactacagactgatcaactgcaacgtgtccacatgcaagcaggcctgtcctaagatgagcttcgaccccattcctatccactactgtgcccctgccggcttcgccatcctgaagtgcagagacaagaagttcaacggcaccggcagctgcaagaatgtgtccaccgtgcagtgtacccacggcatcaagcctgtgatcagcacccagctgctgctgaatggctctgtggccgaagaggaaatcatgatccgcagcgagaactttaccaacaacgccaagaacatcatcgtccagttcaacaagaccatcgacatcatgtgcacccggcctaacaacaacacccggaagtccatcagcctcggacctggacaggccatctatgccaccggcgacatcatcggcaatatcagacaggcccactgcaacatctctggcgccgactggggcaacatgatcagaaatgtgtccgagaagctgaaagagatcttcaacaaaaccaccatcaccttcaaggcctccgctggcggcgacctggaaatcaccacacacagcttcaattgcaggggcgagttcttctactgcgacaccagcgacctgttcaactccagcagattcaacaatagcagcaacgacacgaacgacaccatcacactgccctgcaagatcaagcagatcgtgcggatgtggcagcgcgtgggccagtgtatgtatgcccctcctatcgccggcaacatcacatgcagaagcaatatcaccggcctgctgctcaccagagatggcggcggaaacaacaccaacgagacagaaaccttccggcctgccggcggagacatgagagacaattggagaagcgagctgtacaagtacaaggtggtcaagatcaaccctctgggcgtcgcccctaccagatgtagaagaagagtcgtcggcagacggcggaggcggagagctattggaatgggagctgtgctgctgggctttctgggaacagccggctctacaatgggagccgcctctatcaccctgaccgtgcaagttcgacagctgctgagcggcaaccctgactggctgcctgatatgacagtgtggggaatcaagcagctgcaggccagaatcctggccgtggaaagatacctgaaggaccagcagctcctcggaatctggggctgttctggcaagctgatctgctgcaccaatgtgccctggaacgccagctggtccaacagaagctacaacgacatctgggagaacctgacctgggtcgagtgggagagagagatctccaactacacccagcagatctacagcctgctggaagagagccagaaccagcaagagaagaacgagcaggacctgctggccctggactgataaggatcc

SEQ ID NO: 108 - DNA, 1989 bp, Artificial Sequence
  Description of Artificial Sequence: Synthetic polynucleotide
gtcgacgccaccatgcctatgggatctctgcagcctctggccacactgtacctgctgggaatgctggtggctagcgtgctggcctccaacaatctgtgggtcaccgtgtactacggcgtgcccgtttgggaagatgcctgcacacctctgttctgtgcctccgatgccaaggcctacagcaccaagagcagaaacgtgtgggccacctgttgctgcgtgcccacagatccatctccacaagagatcagcctggacaacgtgaccgagaacttcaacatgtggaagaacaacatggtcgagcagatgcacgaggacatcatcagcctgtgggacgagagcctgaagccttgcgtgaagctgacccctctgtgcgtgaccctgaactgcaccaacgtgaacaacagcagcgccaccaacaactccatggtggacgatagagagggcctgaagaactgcagcttcaacatcaccaccgagctgcgggacaagaagaagcaagagcacgccctgttctaccggctggacatcgtgcccatcaacggcaacagcaactccaacagctccgtgggcgactacagactgatcaactgcaacgtgtccaccatcaagcaggcctgtcctaagatgagcttcgaccccattcctatccactactgtgcccctgccggcttcgccatcctgaagtgcagagacaagaagttcaacggcaccggcagctgcaagaatgtgtccaccgtgcagtgtacccacggcatcaagcctgtgatcagcacccagctgctgctgaatggctctgtggccgaagaggaaatcatgatccgcagcgagaactttaccaacaacgccaagaacatcatcgtccagttcaacaagaccatcgacatcatgtgcacccggcctaacaacaacacccggaagtccatcagcctcggacctggacaagcttggtacgccaccggcgacatcatcggcaatatcagacaggcccactgcaacatctctggcgccgactggggcaacatgatcagaaatgtgtccgagaagctgaaagagatcttcaacaaaaccaccatcaccttcaaggcctccgctggcggcgacctggaaatcaccacacacagcttcaattgcaggggcgagttcttctactgcgacaccagcgacctgttcaactccagcagattcaacaatagcagcaacgacacgaacgacaccatcacactgccctgcaagatcaagcagatcgtgcggatgtggcagcgcgttggccaggctatgtatgcccctcctatcgccggcaacatcacatgcagaagcaatatcaccggcctgctgctcaccagagatggcggcggaaacaacaccaacgagacagagacatttcggcctgccggcggagacatgagagacaattggagaagcgagctgtacaagtacaaggtggtcaagatcaaccctctgggcgtcgcccctaccagatgtagaagaagagtcgtcggcagacggcggaggcggagagctattggaatgggagctgtgctgctgggctttctgggaacagccggctctacaatgggagccgccagcatgacactgaccgtgcaagttcgacagctgctgagcggaatcgtgcagcagcagagcaactgtctgagagcccctgagtgccagcagtgtctgctgcaactgacagtgtggggaatcaagcagctgcaggccagaatcctggccgtggaaagatacctgaaggaccagcagctcctcggaatctggggctgttctggcaagctgatctgctgcaccaatgtgccctggaacgccagctggtccaacagaagctacaacgacatctgggagaacctgacctgggtcgagtgggagagagagatctccaactacacccagcagatctacagcctgctggaagagagccagaaccagcaagagaagaacgagcaggacctgctggccctggactgataaggatcc

SEQ ID NO: 109 - DNA, 1989 bp, Artificial Sequence
  Description of Artificial Sequence: Synthetic polynucleotide
gtcgacgccaccatgcctatgggatctctgcagcctctggccacactgtacctgctgggaatgctggtggctagcgtgctggcctccaacaatctgtgggtcaccgtgtactacggcgtgcccgtttgggaagatgccgagacacctctgttctgtgcctccgatgccaaggcctacagcaccgagaagcacaacgtgtgggccactcatgcctgcgtgccaaccgatccatctcctcaagagatcagcctggacaacgtgaccgagaacttcaacatgtggaagaacaacatggtcgagcagatgcacaccgacatcatcagcctgtgggacgagagcctgaagccttgcgtgaagctgacccctctgtgcgtgaccctgaactgcaccaacgtgaacaacagcagcgccaccaacaactccatggtggacgatagagagggcctgaagaactgcagcttcaacatcaccaccgagctgcgggacaagaaaaaacaggtgcacgccctgttctaccggctggacatcgtgcccatcaacggcaacagcaactccaacagctccgtgggcgactacagactgatcaactgcaacgtgtccaccatcaagcaggcctgtcctaagatgagcttcgaccccattcctatccactactgtgcccctgccggcttcgccatcctgaagtgcagagacaagaagttcaacggcaccggcagctgcaagaatgtgtccaccgtgcagtgtacccacggcatcaagcctgtgatcagcacccagctgctgctgaatggctctgtggccgaagaggaaatcatgatccgcagcgagaactttaccaacaacgccaagaacatcatcgtccagttcaacaagaccatcgacatcatgtgcacccggcctaacaacaacaccagaaagagcatcagactcggcccaggccaggccatctatgccacaggcgatatcatcggcaacatccggcaggcccactgcaatatctctggcgccgattggggcaacatgatccggaacgtgtccgaaaagctgaaagagatcttcaacaaaaccaccatcaccttcaaggcctccgctggcggcgacctggaaatcaccacacacagcttcaattgcaggggcgagttcttctactgcgacaccagcgacctgttcaactccagcagattcaacaatagcagcaacgacacgaacgacaccatcacactgccctgcaagatcaagcagatcgtgcggatgtggcagcgcgttggccaggctatgtatgctcctcctatcgccggcaatatcacctgtcggagcaacattaccggcctgctgctcaccagagatggcggcggaaacaataccaacgagacagaaaccttccggccagccggcggagacatgagagacaattggagaagcgagctgtacaagtacaaggtggtcaagatcaaccctctgggcgtcgcccctaccagatgtagaagaagagtcgtcggcagacggcggaggcggagagctattggaatgggagctgtgctgctgggctttctgggaacagccggctctacaatgggagccgcctctatcaccctgaccgtgcaagtgcgcaatctgctgtctggcatcgtgcagcagcagagcaacctgctgagagcccctgaagctcagcagcatctcctgcagctgacagtgtggggaatcaagcagctccaggccagaatcctggccgtcgagagatacctgagggaccagcagctcctcggaatctggggctgttctggcaagctgatctgctgcaccaatgtgccctggaacgccagctggtccaacagaagctacaacgacatctgggagaacctgacctgggtcgagtgggagagagagatctccaactacacccagcagatctacagcctgctggaagagagccagaaccagcaagagaagaacgagcaggacctgctggccctggactgataaggatcc

SEQ ID NO: 110 - DNA, 2022 bp, Artificial Sequence
  Description of Artificial Sequence: Synthetic polynucleotide
gtcgacgccaccatggatgctatgaagaggggcctgtgctgcgtgctgcttctgtgtggcgctgtgtttgtgtcccctagccaagagatccacgccagattcagaagaggcgccagagccgagaatctgtgggtcacagtgtactatggcgtgcccgtgtgggaagatgccgacacacctctgttttgtgccagcgacgccaaggcctacagcaccgagtctcacaatgtgtgggccactcacgcctgcgtgccaaccgatccatctcctcaagagatcagcctggacaacgtgaccgagaacttcaacatgtggaagaacaacatggtcgagcagatgcacgaggacatcatcagcctgtgggacgagagcctgaagccttgcgtgaagctgacccctctgtgcgtgaccctgaactgcaccaacgtgaacaacagcagcgccaccaacaactccatggtggacgatagagagggcctgaagaactgcagcttcaacatcaccaccgagctgcgggacaagaagaagcaagagcacgccctgttctaccggctggacatcgtgcccatcaacggcaacagcaactccaacagctccgtgggcgactacagactgatcaactgcaacgtgtccacatgcaagcaggcctgtcctaagatgagcttcgaccccattcctatccactactgtgcccctgccggcttcgccatcctgaagtgcagagacaagaagttcaacggcaccggcagctgcaagaatgtgtccaccgtgcagtgtacccacggcatcaagcctgtgatcagcacccagctgctgctgaatggctctgtggccgaagaggaaatcatgatccgcagcgagaactttaccaacaacgccaagaacatcatcgtccagttcaacaagaccatcgacatcatgtgcacccggcctaacaacaacacccggaagtccatcagcctcggacctggacaggccatctatgccaccggcgacatcatcggcaatatcagacaggcccactgcaacatctctggcgccgactggggcaacatgatcagaaatgtgtccgagaagctgaaagagatcttcaacaaaaccaccatcaccttcaaggcctccgctggcggcgacctggaaatcaccacacacagcttcaattgcaggggcgagttcttctactgcgacaccagcgacctgttcaactccagcagattcaacaatagcagcaacgacacgaacgacaccatcacactgccctgcaagatcaagcagatcgtgcggatgtggcagcgcgtgggccagtgtatgtatgcccctcctatcgccggcaacatcacatgcagaagcaatatcaccggcctgctgctcaccagagatggcggcggaaacaacaccaacgagacagaaaccttccggcctgccggcggagacatgagagacaattggagaagcgagctgtacaagtacaaggtggtcaagatcgagcccctgggcgtcgcacctacacggtgcaagagaagagtcgtgggccgtcgtagaaggcggagagccgttggaattggcgccgtgttcctgggctttctgggagccgctggatctacaatgggcgctgccagcatgaccctgacagtgcaggctagaaatctgctgagcggcatcgtgcagcagcagagcaatctgctcagagcccctgaggctcagcagcacctcctgaaactgacagtgtggggaatcaagcagctgcaggccagagtgctggctgtggaaagatacctgagggaccagcagctcctcggaatctggggctgttctggcaagctgatctgctgcaccaatgtgccctggaacagctcctggtccaaccggaatctgagcgagatctgggacaatatgacctggctgcagtgggacaaagagattagcaactacacccagatcatctacggactgctggaagagagccagaaccagcaagagaaaaacgagcaggacctgctggccctggactgataaggatcc

SEQ ID NO: 111 - DNA, 2022 bp, Artificial Sequence
  Description of Artificial Sequence: Synthetic polynucleotide
gtcgacgccaccatggatgctatgaagaggggcctgtgctgcgtgctgcttctgtgtggcgctgtgtttgtgtcccctagccaagagatccacgccagattcagaagaggcgccagatccaacaatctgtgggtcaccgtgtactacggcgtgcccgtttgggaagatgccgacacacctctgttctgtgcctccgatgccaaggcctacagcaccgagtctcacaacgtgtgggccactcatgcctgcgtgccaaccgatccatctcctcaagagatcagcctggacaacgtgaccgagaacttcaacatgtggaagaacaacatggtcgagcagatgcacgaggacatcatcagcctgtgggacgagagcctgaagccttgcgtgaagctgacccctctgtgcgtgaccctgaactgcaccaacgtgaacaacagcagcgccaccaacaactccatggtggacgatagagagggcctgaagaactgcagcttcaacatcaccaccgagctgcgggacaagaagaagcaagagcacgccctgttctaccggctggacatcgtgcccatcaacggcaacagcaactccaacagctccgtgggcgactacagactgatcaactgcaacgtgtccaccatcaagcaggcctgtcctaagatgagcttcgaccccattcctatccactactgtgcccctgccggcttcgccatcctgaagtgcagagacaagaagttcaacggcaccggcagctgcaagaatgtgtccaccgtgcagtgtacccacggcatcaagcctgtgatcagcacccagctgctgctgaatggctctgtggccgaagaggaaatcatgatccgcagcgagaactttaccaacaacgccaagaacatcatcgtccagttcaacaagaccatcgacatcatgtgcacccggcctaacaacaacacccggaagtccatcagcctcggacctggacaggccatctatgccaccggcgacatcatcggcaatatcagacaggcccactgcaacatctctggcgccgactggggcaacatgatcagaaatgtgtccgagaagctgaaagagatcttcaacaaaaccaccatcaccttcaaggcctccgctggcggcgacctggaaatcaccacacacagcttcaattgcaggggcgagttcttctactgcgacaccagcgacctgttcaactccagcagattcaacaatagcagcaacgacacgaacgacaccatcacactgccctgcaagatcaagcagatcgtgcggatgtggcagcgcgttggccaggctatgtatgcccctcctatcgccggcaacatcacatgcagaagcaatatcaccggcctgctgctcaccagagatggcggcggaaacaacaccaacgagacagaaaccttccggcctgccggcggagacatgagagacaattggagaagcgagctgtacaagtacaaggtggtcaagatcaaccctctgggcgtcgcccctaccagatgtagaagaagagtcgtcggcagacggcggaggcggagagctattggaatgggagctgtgctgctgggctttctgggaacagccggctctacaatgggagccgcctctatcaccctgaccgtgcaagttcgacagctgctgtctggcatcgtgcagcagcagagcaacctgctgagagcccctgaagctcagcagcatctcctgcagctgacagtgtggggaatcaagcagctccaggccagaatcctggccgtcgagagatacctgaaggaccagcagctcctcggaatctggggctgttctggcaagctgatctgctgcaccaatgtgccctggaacgccagctggtccaacagaagctacaacgacatctgggagaacctgacctgggtcgagtgggagagagagatctccaactacacccagcagatctacagcctgctggaagagagccagaaccagcaagagaagaacgagcaggacctgctggccctggactgataaggatcc

SEQ ID NO: 112 - DNA, 2022 bp, Artificial Sequence
  Description of Artificial Sequence: Synthetic polynucleotide
gtcgacgccaccatggatgctatgaagaggggcctgtgctgcgtgctgcttctgtgtggcgctgtgtttgtgtcccctagccaagagatccacgccagattcagaagaggcgccagatccaacaatctgtgggtcaccgtgtactacggcgtgcccgtttgggaagatgccgacacacctctgttctgtgcctccgatgccaaggcctacagcaccgagtctcacaacgtgtgggccactcatgcctgcgtgccaaccgatccatctcctcaagagatcagcctggacaacgtgaccgagaacttcaacatgtggaagaacaacatggtcgagcagatgcacgaggacatcatcagcctgtgggacgagagcctgaagccttgcgtgaagctgacccctctgtgcgtgaccctgaactgcaccaacgtgaacaacagcagcgccaccaacaactccatggtggacgatagagagggcctgaagaactgcagcttcaacatcaccaccgagctgcgggacaagaagaagcaagagcacgccctgttctaccggctggacatcgtgcccatcaacggcaacagcaactccaacagctccgtgggcgactacagactgatcaactgcaacgtgtccacctgcaagcaggcctgtcctaagatgagcttcgaccccattcctatccactactgtgcccctgccggcttcgccatcctgaagtgcagagacaagaagttcaacggcaccggcagctgcaagaatgtgtccaccgtgcagtgtacccacggcatcaagcctgtgatcagcacccagctgctgctgaatggctctgtggccgaagaggaaatcatgatccgcagcgagaactttaccaacaacgccaagaacatcatcgtccagttcaacaagaccatcgacatcatgtgcacccggcctaacaacaacacccggaagtccatcagcctcggacctggacaggccatctatgccaccggcgacatcatcggcaatatcagacaggcccactgcaacatctctggcgccgactggggcaacatgatcagaaatgtgtccgagaagctgaaagagatcttcaacaaaaccaccatcaccttcaaggcctccgctggcggcgacctggaaatcaccacacacagcttcaattgcaggggcgagttcttctactgcgacaccagcgacctgttcaactccagcagattcaacaatagcagcaacgacacgaacgacaccatcacactgccctgcaagatcaagcagatcgtgcggatgtggcagcgcgttggccagtgcatgtatgcccctcctatcgccggcaacatcacatgcagaagcaatatcaccggcctgctgctcaccagagatggcggcggaaacaacaccaacgagacagaaaccttccggcctgccggcggagacatgagagacaattggagaagcgagctgtacaagtacaaggtggtcaagatcaaccctctgggcgtcgcccctaccagatgtagaagaagagtcgtcggcagacggcggaggcggagagctattggaatgggagctgtgctgctgggctttctgggaacagccggctctacaatgggagccgcctctatcaccctgaccgtgcaagttcgacagctgctgtctggcatcgtgcagcagcagagcaacctgctgagagcccctgaagctcagcagcatctcctgcagctgacagtgtggggaatcaagcagctccaggccagaatcctggccgtcgagagatacctgaaggaccagcagctcctcggaatctggggctgttctggcaagctgatctgctgcaccaatgtgccctggaacgccagctggtccaacagaagctacaacgacatctgggagaacctgacctgggtcgagtgggagagagagatctccaactacacccagcagatctacagcctgctggaagagagccagaaccagcaagagaagaacgagcaggacctgctggccctggactgataaggatcc

SEQ ID NO: 113 - DNA, 1983 bp, Artificial Sequence
  Description of Artificial Sequence: Synthetic polynucleotide
gtcgacgccaccatggatgctatgaagaggggcctgtgctgcgtgctgcttctgtgtggcgctgtgtttgtgtcccctagccaagagatccacgccagattcagaagaggcgccagatccaacaatctgtgggtcaccgtgtactacggcgtgcccgtttgggaagatgccgacacacctctgttctgtgcctccgatgccaaggcctacagcaccgagtctcacaacgtgtgggccactcatgcctgcgtgccaaccgatccatctcctcaagagatcagcctggacaacgtgaccgagaacttcaacatgtggaagaacaacatggtcgagcagatgcacgaggacatcatcagcctgtgggacgagagcctgaagccttgcgtgaagctgacccctctgtgcgtgaccctgaactgcaccaacgtgaacaacagcagcgccaccaacaactccatggtggacgatagagagggcctgaagaactgcagcttcaacatcaccaccgagctgcgggacaagaagaagcaagagcacgccctgttctaccggctggacatcgtgcccatcaacggcaacagcaactccaacagctccgtgggcgactacagactgatcaactgcaacgtgtccacatgcaagcaggcctgtcctaagatgagcttcgaccccattcctatccactactgtgcccctgccggcttcgccatcctgaagtgcagagacaagaagttcaacggcaccggcagctgcaagaatgtgtccaccgtgcagtgtacccacggcatcaagcctgtgatcagcacccagctgctgctgaatggctctgtggccgaagaggaaatcatgatccgcagcgagaactttaccaacaacgccaagaacatcatcgtccagttcaacaagaccatcgacatcatgtgcacccggcctaacaacaacacccggaagtccatcagcctcggacctggacaggccatctatgccaccggcgacatcatcggcaatatcagacaggcccactgcaacatctctggcgccgactggggcaacatgatcagaaatgtgtccgagaagctgaaagagatcttcaacaaaaccaccatcaccttcaaggcctccgctggcggcgacctggaaatcaccacacacagcttcaattgcaggggcgagttcttctactgcgacaccagcgacctgttcaactccagcagattcaacaatagcagcaacgacacgaacgacaccatcacactgccctgcaagatcaagcagatcgtgcggatgtggcagcgcgtgggccagtgtatgtatgcccctcctatcgccggcaacatcacatgcagaagcaatatcaccggcctgctgctcaccagagatggcggcggaaacaacaccaacgagacagaaaccttccggcctgccggcggagacatgagagacaattggagaagcgagctgtacaagtacaaggtggtcaagatcaaccctctgggcgtcgcccctaccagatgtagaagaagagtcgtcggcagacggcggaggcggagagctattggaatgggagctgtgctgctgggctttctgggaacagccggctctacaatgggagccgcctctatcaccctgaccgtgcaagttcgacagctgctgagcggcaaccctgactggctgcctgatatgacagtgtggggaatcaagcagctgcaggccagaatcctggccgtggaaagatacctgaaggaccagcagctcctcggaatctggggctgttctggcaagctgatctgctgcaccaatgtgccctggaacgccagctggtccaacagaagctacaacgacatctgggagaacctgacctgggtcgagtgggagagagagatctccaactacacccagcagatctacagcctgctggaagagagccagaaccagcaagagaagaacgagcaggacctgctggccctggactgataaggatcc

SEQ ID NO: 114 - DNA, 2022 bp, Artificial Sequence
  Description of Artificial Sequence: Synthetic polynucleotide
gtcgacgccaccatggatgctatgaagaggggcctgtgctgcgtgctgcttctgtgtggcgctgtgtttgtgtcccctagccaagagatccacgccagattcagaagaggcgccagatccaacaatctgtgggtcaccgtgtactacggcgtgcccgtttgggaagatgcctgcacacctctgttctgtgcctccgatgccaaggcctacagcaccaagagcagaaacgtgtgggccacctgttgctgcgtgcccacagatccatctccacaagagatcagcctggacaacgtgaccgagaacttcaacatgtggaagaacaacatggtcgagcagatgcacgaggacatcatcagcctgtgggacgagagcctgaagccttgcgtgaagctgacccctctgtgcgtgaccctgaactgcaccaacgtgaacaacagcagcgccaccaacaactccatggtggacgatagagagggcctgaagaactgcagcttcaacatcaccaccgagctgcgggacaagaagaagcaagagcacgccctgttctaccggctggacatcgtgcccatcaacggcaacagcaactccaacagctccgtgggcgactacagactgatcaactgcaacgtgtccaccatcaagcaggcctgtcctaagatgagcttcgaccccattcctatccactactgtgcccctgccggcttcgccatcctgaagtgcagagacaagaagttcaacggcaccggcagctgcaagaatgtgtccaccgtgcagtgtacccacggcatcaagcctgtgatcagcacccagctgctgctgaatggctctgtggccgaagaggaaatcatgatccgcagcgagaactttaccaacaacgccaagaacatcatcgtccagttcaacaagaccatcgacatcatgtgcacccggcctaacaacaacacccggaagtccatcagcctcggacctggacaagcttggtacgccaccggcgacatcatcggcaatatcagacaggcccactgcaacatctctggcgccgactggggcaacatgatcagaaatgtgtccgagaagctgaaagagatcttcaacaaaaccaccatcaccttcaaggcctccgctggcggcgacctggaaatcaccacacacagcttcaattgcaggggcgagttcttctactgcgacaccagcgacctgttcaactccagcagattcaacaatagcagcaacgacacgaacgacaccatcacactgccctgcaagatcaagcagatcgtgcggatgtggcagcgcgttggccaggctatgtatgcccctcctatcgccggcaacatcacatgcagaagcaatatcaccggcctgctgctcaccagagatggcggcggaaacaacaccaacgagacagagacatttcggcctgccggcggagacatgagagacaattggagaagcgagctgtacaagtacaaggtggtcaagatcaaccctctgggcgtcgcccctaccagatgtagaagaagagtcgtcggcagacggcggaggcggagagctattggaatgggagctgtgctgctgggctttctgggaacagccggctctacaatgggagccgccagcatgacactgaccgtgcaagttcgacagctgctgagcggaatcgtgcagcagcagagcaactgtctgagagcccctgagtgccagcagtgtctgctgcaactgacagtgtggggaatcaagcagctgcaggccagaatcctggccgtggaaagatacctgaaggaccagcagctcctcggaatctggggctgttctggcaagctgatctgctgcaccaatgtgccctggaacgccagctggtccaacagaagctacaacgacatctgggagaacctgacctgggtcgagtgggagagagagatctccaactacacccagcagatctacagcctgctggaagagagccagaaccagcaagagaagaacgagcaggacctgctggccctggactgataaggatcc

SEQ ID NO: 115 - DNA, 2022 bp, Artificial Sequence
  Description of Artificial Sequence: Synthetic polynucleotide
gtcgacgccaccatggatgctatgaagaggggcctgtgctgcgtgctgcttctgtgtggcgctgtgtttgtgtcccctagccaagagatccacgccagattcagaagaggcgccagatccaacaatctgtgggtcaccgtgtactacggcgtgcccgtttgggaagatgccgagacacctctgttctgtgcctccgatgccaaggcctacagcaccgagaagcacaacgtgtgggccactcatgcctgcgtgccaaccgatccatctcctcaagagatcagcctggacaacgtgaccgagaacttcaacatgtggaagaacaacatggtcgagcagatgcacaccgacatcatcagcctgtgggacgagagcctgaagccttgcgtgaagctgacccctctgtgcgtgaccctgaactgcaccaacgtgaacaacagcagcgccaccaacaactccatggtggacgatagagagggcctgaagaactgcagcttcaacatcaccaccgagctgcgggacaagaaaaaacaggtgcacgccctgttctaccggctggacatcgtgcccatcaacggcaacagcaactccaacagctccgtgggcgactacagactgatcaactgcaacgtgtccaccatcaagcaggcctgtcctaagatgagcttcgaccccattcctatccactactgtgcccctgccggcttcgccatcctgaagtgcagagacaagaagttcaacggcaccggcagctgcaagaatgtgtccaccgtgcagtgtacccacggcatcaagcctgtgatcagcacccagctgctgctgaatggctctgtggccgaagaggaaatcatgatccgcagcgagaactttaccaacaacgccaagaacatcatcgtccagttcaacaagaccatcgacatcatgtgcacccggcctaacaacaacaccagaaagagcatcagactcggcccaggccaggccatctatgccacaggcgatatcatcggcaacatccggcaggcccactgcaatatctctggcgccgattggggcaacatgatccggaacgtgtccgaaaagctgaaagagatcttcaacaaaaccaccatcaccttcaaggcctccgctggcggcgacctggaaatcaccacacacagcttcaattgcaggggcgagttcttctactgcgacaccagcgacctgttcaactccagcagattcaacaatagcagcaacgacacgaacgacaccatcacactgccctgcaagatcaagcagatcgtgcggatgtggcagcgcgttggccaggctatgtatgctcctcctatcgccggcaatatcacctgtcggagcaacattaccggcctgctgctcaccagagatggcggcggaaacaataccaacgagacagaaaccttccggccagccggcggagacatgagagacaattggagaagcgagctgtacaagtacaaggtggtcaagatcaaccctctgggcgtcgcccctaccagatgtagaagaagagtcgtcggcagacggcggaggcggagagctattggaatgggagctgtgctgctgggctttctgggaacagccggctctacaatgggagccgcctctatcaccctgaccgtgcaagtgcgcaatctgctgtctggcatcgtgcagcagcagagcaacctgctgagagcccctgaagctcagcagcatctcctgcagctgacagtgtggggaatcaagcagctccaggccagaatcctggccgtcgagagatacctgagggaccagcagctcctcggaatctggggctgttctggcaagctgatctgctgcaccaatgtgccctggaacgccagctggtccaacagaagctacaacgacatctgggagaacctgacctgggtcgagtgggagagagagatctccaactacacccagcagatctacagcctgctggaagagagccagaaccagcaagagaagaacgagcaggacctgctggccctggactgataaggatcc

SEQ ID NO: 116 - DNA, 1956 bp, Artificial Sequence
  Description of Artificial Sequence: Synthetic polynucleotide
gtcgacgccaccatgggatctctgcaacctctggccacactgtacctgctgggaatgctggtggcttctgtgctggccgccgagaatctgtgggtcacagtgtactatggcgtgcccgtgtggaaagaggccaagaccacactgttctgtgccagcgacgccaaggcctacgatcccgaagtgcacaatgtgtgggccactcacgcctgcgtgcccaccgatcctaatcctcaagagatgttcctggaaaacgtgaccgagaacttcaacatgtggaagaacgacatggtcgagcagatgcaccaggacatcatcagcctgtggtcccagagcctgaagccttgcgtgaagctgacccctctgtgcgtgaccctgaattgcagcgacgtgatcaacagcaccggcaccatgaagaactgcagcttcagcgtgaccaccgagctgcgggacagaaagcagaagaagcacgccctgttctaccggctggacatcgtgcccctggacgagaacgacaacagcagcaaggactacagactgatcaactgcaacaccagcacatgcacccaggcctgtcctaaagtgaccttcgatcccattcctatccactactgtgcccctgccggctacgccatcctgaagtgcaacaacaagaccttcaacggcacaggcccctgcaacaacgtgtccaccgtgcagtgtacccacggcatcaagccagtggtgtctacccagctgctgctgaatggctctctggccgaggaagaagtgatcatcagaagcgagaacctgaccgacaacgtcaagaccatcatcgtgcagctgaaagaacccgtgggcatcaattgcacccggcctaacaacaacatccggcagagcatcagaatcggccctggccagacctttttcgccaccggcgatatcatcggcgacatcagagaggcccactgcaatatcagcagcaccaagtggcgggaaaccctgcagcaagttggaggcaagctggccaagtacttcaacaacaaaacgatcaagttcacccagcactctggcggcgacctggaaatcaccacacacagcttcaactgcagaggcgagttcttctactgtaataccagccagctgttcaactccacctacaacgagacaggctccatcaatggcaccggcaatagcaccatcaagctgccctgccggatcaagcagatcatcaatatgtggcaaggcgtgggccagtgtatgtacgcccctcctatcgccggcaacatcatctgcagaagcaagatcaccggcctgctgctcacaagagatggcggcatcaacaagagcgaggaaatcttcagacccggcggaggcaacatgaaggacaactggcgggacaattggcggagcgagctgtacaagtacaaggtggtcaagatcgagcccctgggcgtcgcacctacacggtgcaagagaagagtcgtgggacgtagacgaaggcggagagccgttggaatcggagccgtgttcctgggctttctgggagccgctggatctacaatgggcgctgccagcatgaccctgacagtgcaggctagaaatctgctgagcggcatcgtccagcagcagagcaatctgctcagagcccctgaggctcagcagcatctcctgaaactgaccgtgtggggaatcaagcagctgcaggccagagttctggccgtggaaagatacctgagggaccagcagctcctcggcatctggggctgttctggcaagctgatctgctgcaccaacgtgccctggaacagctcctggtccaacagaaacctgagcgagatctgggacaacatgacctggctgcagtgggacaaagagatcagcaactacacccagatcatctacggactgctggaagagagccagaaccagcaagagaaaaacgagcaggacctgctggccctggactgataaggatcc

SEQ ID NO: 117 - DNA, 1941 bp, Artificial Sequence
  Description of Artificial Sequence: Synthetic polynucleotide
gtcgacgccaccatgggatctctgcaacctctggccacactgtacctgctgggaatgctggtggctagcgtgctggccaatctgtgggtcacagtgtactacggcgtgcccgtgtggaaagaggccaagaccacactgttctgtgccagcgacgccaaggcctacgatcccgaagtgcacaatgtgtgggccactcacgcctgcgtgcccaccgatcctaatcctcaagagatgttcctggaaaacgtgaccgagaacttcaacatgtggaagaacgacatggtcgagcagatgcaccaggacatcatcagcctgtggtcccagagcctgaagccttgcgtgaagctgacccctctgtgcgtgaccctgaattgcagcgacgtgatcaacagcaccggcaccatgaagaactgcagcttcagcgtgaccaccgagctgcgggacagaaagcagaagaagcacgccctgttctaccggctggacatcgtgcccctggacgagaacgacaacagcagcaaggactacagactgatcaactgcaacaccagcacatgcacccaggcctgtcctaaagtgaccttcgatcccattcctatccactactgtgcccctgccggctacgccatcctgaagtgcaacaacaagaccttcaacggcacaggcccctgcaacaacgtgtccaccgtgcagtgtacccacggcatcaagccagtggtgtctacccagctgctgctgaatggctctctggccgaggaagaagtgatcatcagaagcgagaacctgaccgacaacgtcaagaccatcatcgtgcagctgaaagaacccgtgggcatcaattgcacccggcctaacaacaacatccggcagagcatcagaatcggccctggccagacctttttcgccaccggcgatatcatcggcgacatcagagaggcccactgcaatatcagcagcaccaagtggcgggaaaccctgcagcaagttggaggcaagctggccaagtacttcaacaacaaaacgatcaagttcacccagcactctggcggcgacctggaaatcaccacacacagcttcaactgcagaggcgagttcttctactgtaataccagccagctgttcaactccacctacaacgagacaggctccatcaatggcaccggcaatagcaccatcaagctgccctgccggatcaagcagatcatcaatatgtggcaaggcgtgggccagtgtatgtacgcccctcctatcgccggcaacatcatctgcagaagcaagatcaccggcctgctgctcacaagagatggcggcatcaacaagagcgaggaaatcttcagacccggcggaggcaacatgaaggacaattggagaagcgagctgtacaagtacaaggtggtggaaatcaagcccctgggcgtcgcccctacaaagtgcaagagaagagtggtggaacggcggagaaggcggagagctgttgttggactgggagccgtgttcctgggctttcttggagccgccggatctacaatgggagccgcctctatcaccctgaccgtgcaggctagacagctgctgagcggaattgtccagcagcagaacaacctgctgagagcccctgaagcacagcaacacatgctgcagctgaccgtgtggggaatcaaacagctgcaggccagagtcctggccatcgagagatacctgaaggaccagcagctcctcggcatctggggctgttctggcaagctgatctgctgtactgccgtgccttggaacagctcctggtccaacaagtcccaagaggacatctgggacaacatgacctggatgcagtgggacagagagatcagcaactacaccaacaccatctaccgcctgctggaagatagccagacacagcaagagaaaaacgagaaggacctgctggccctggactgatgaggatcc

SEQ ID NO: 118 - DNA, 1941 bp, Artificial Sequence
  Description of Artificial Sequence: Synthetic polynucleotide
gtcgacgccaccatgggatctctgcaacctctggccacactgtacctgctgggaatgctggtggctagcgtgctggccaatctgtgggtcacagtgtactacggcgtgcccgtgtggaaagaggcctgcaccacactgttttgtgccagcgacgccaaggcctacgatcccaaagtgcggaatgtgtgggccactcactgctgcgtgcccaccgatcctaatcctcaagagatgttcctggaaaacgtgaccgagaacttcaacatgtggaagaacgacatggtcgagcagatgcaccaggacatcatcagcctgtggtcccagagcctgaagccttgcgtgaagctgacccctctgtgcgtgaccctgaattgcagcgacgtgatcaacagcaccggcaccatgaagaactgcagcttcagcgtgaccaccgagctgcgggacagaaagcagaagaagcacgccctgttctaccggctggacatcgtgcccctggacgagaacgacaacagcagcaaggactacagactgatcaactgcaacaccagcacatgcacccaggcctgtcctaaagtgaccttcgatcccattcctatccactactgtgcccctgccggctacgccatcctgaagtgcaacaacaagaccttcaacggcacaggcccctgcaacaacgtgtccaccgtgcagtgtacccacggcatcaagccagtggtgtctacccagctgctgctgaatggctctctggccgaggaagaagtgatcatcagaagcgagaacctgaccgacaacgtcaagaccatcatcgtgcagctgaaagaacccgtgggcatcaattgcacccggcctaacaacaacatccggcagagcatcagaatcggccctggccagacttggtttgccaccggcgatatcatcggcgacatcagagaggcccactgcaatatcagcagcaccaagtggcgggaaaccctgcagcaagttggaggcaagctggccaagtacttcaacaacaaaacgatcaagttcacccagcactctggcggcgacctggaaatcaccacacacagcttcaactgcagaggcgagttcttctactgtaataccagccagctgttcaactccacctacaacgagacaggctccatcaatggcaccggcaatagcaccatcaagctgccctgccggatcaagcagatcatcaatatgtggcaaggcgtgggccagtgtatgtacgcccctcctatcgccggcaacatcatctgcagaagcaagatcaccggcctgctgctcacaagagatggcggcatcaacaagagcgaggaaatcttcagacccggcggaggcaacatgaaggacaattggagaagcgagctgtacaagtacaaggtggtggaaatcaagcccctgggcgtcgcccctacaaagtgcaagagaagagtggtggaacggcggagaaggcggagagctgttgttggactgggagccgtgttcctgggctttcttggagccgccggatctacaatgggagccgcctctatgaccctgaccgtgcaggctagacagctgctgagcggaattgtccagcagcagaacaactgcctgagagcccctgagtgccagcagtgtatgctgcagctgacagtgtggggaatcaagcagctgcaggccagagttctggccatcgagagatacctgaaggaccagcagctcctcggcatctggggctgttctggcaagctgatctgctgtactgccgtgccttggaacagctcctggtccaacaagtcccaagaggacatctgggacaacatgacctggatgcagtgggacagagagatcagcaactacaccaacaccatctaccgcctgctggaagatagccagacacagcaagagaaaaacgagaaggacctgctggccctggactgatgaggatcc

SEQ ID NO: 119 - DNA, 1902 bp, Artificial Sequence
  Description of Artificial Sequence: Synthetic polynucleotide
gtcgacgccaccatgggatctctgcaacctctggccacactgtacctgctgggaatgctggtggctagcgtgctggccaatctgtgggtcacagtgtactacggcgtgcccgtgtggaaagaggccaagaccacactgttctgtgccagcgacgccaaggcctacgatcccgaagtgcacaatgtgtgggccactcacgcctgcgtgcccaccgatcctaatcctcaagagatgttcctggaaaacgtgaccgagaacttcaacatgtggaagaacgacatggtcgagcagatgcaccaggacatcatcagcctgtggtcccagagcctgaagccttgcgtgaagctgacccctctgtgcgtgaccctgaattgcagcgacgtgatcaacagcaccggcaccatgaagaactgcagcttcagcgtgaccaccgagctgcgggacagaaagcagaagaagcacgccctgttctaccggctggacatcgtgcccctggacgagaacgacaacagcagcaaggactacagactgatcaactgcaacaccagcacatgcacccaggcctgtcctaaagtgaccttcgatcccattcctatccactactgtgcccctgccggctacgccatcctgaagtgcaacaacaagaccttcaacggcacaggcccctgcaacaacgtgtccaccgtgcagtgtacccacggcatcaagccagtggtgtctacccagctgctgctgaatggctctctggccgaggaagaagtgatcatcagaagcgagaacctgaccgacaacgtcaagaccatcatcgtgcagctgaaagaacccgtgggcatcaattgcacccggcctaacaacaacatccggcagagcatcagaatcggccctggccagacctttttcgccaccggcgatatcatcggcgacatcagagaggcccactgcaatatcagcagcaccaagtggcgggaaaccctgcagcaagttggaggcaagctggccaagtacttcaacaacaaaacgatcaagttcacccagcactctggcggcgacctggaaatcaccacacacagcttcaactgcagaggcgagttcttctactgtaataccagccagctgttcaactccacctacaacgagacaggctccatcaatggcaccggcaatagcaccatcaagctgccctgccggatcaagcagatcatcaatatgtggcaaggcgtgggccagtgtatgtacgcccctcctatcgccggcaacatcatctgcagaagcaagatcaccggcctgctgctcacaagagatggcggcatcaacaagagcgaggaaatcttcagacccggcggaggcaacatgaaggacaattggagaagcgagctgtacaagtacaaggtggtggaaatcaagcccctgggcgtcgcccctacaaagtgcaagagaagagtggtggaacggcggagaaggcggagagctgttgttggactgggagccgtgttcctgggctttcttggagccgccggatctacaatgggagccgcctctatcaccctgaccgtgcaggctagacagctgctgagcggcaatcctgactggctgcctgatatgaccgtgtggggaatcaagcagctgcaggccagagttctggccatcgagagatacctgaaggaccagcagctcctcggcatctggggctgttctggcaagctgatctgctgtactgccgtgccttggaacagctcctggtccaacaagtcccaagaggacatctgggacaacatgacctggatgcagtgggacagagagatcagcaactacaccaacaccatctaccgcctgctggaagatagccagacacagcaagagaaaaacgagaaggacctgctggccctggactgatgaggatcc

SEQ ID NO: 120 - DNA, 1941 bp, Artificial Sequence
  Description of Artificial Sequence: Synthetic polynucleotide
gtcgacgccaccatgggatctctgcaacctctggccacactgtacctgctgggaatgctggtggctagcgtgctggccaatctgtgggtcacagtgtactacggcgtgcccgtgtggaaggatgccgagacaacactgttctgtgccagcgacgccaaggcctacgatcccgagaaacacaacgtgtgggccactcacgcctgcgtgccaaccgatcctaatcctcaagagatgttcctggaaaacgtgaccgagaacttcaacatgtggaagaacgacatggtcgagcagatgcacaccgacatcatcagcctgtggtcccagagcctgaagccttgcgtgaagctgacccctctgtgcgtgaccctgaattgcagcgacgtgatcaacagcaccggcaccatgaagaactgcagcttcagcgtgaccaccgagctgcgggacagaaagcagaaagtgcacgccctgttctaccggctggacatcgttcctctggacgagaacgacaacagcagcaaggactacagactgatcaactgcaacaccagcacatgcacccaggcctgtcctaaagtgaccttcgatcccattcctatccactactgtgcccctgccggctacgccatcctgaagtgcaacaacaagaccttcaacggcacaggcccctgcaacaacgtgtccaccgtgcagtgtacccacggcatcaagccagtggtgtctacccagctgctgctgaatggctctctggccgaggaagaagtgatcatcagaagcgagaacctgaccgacaacgtcaagaccatcatcgtgcagctgaaagaacccgtgggcatcaattgcacccggcctaacaacaacatccggcagagcatcagaatcggccctggccagacctttttcgccaccggcgatatcatcggcgacatcagagaggcccactgcaatatcagcagcaccaagtggcgggaaaccctgcagcaagttggaggcaagctggccaagtacttcaacaacaaaacgatcaagttcacccagcactctggcggcgacctggaaatcaccacacacagcttcaactgcagaggcgagttcttctactgtaataccagccagctgttcaactccacctacaacgagacaggctccatcaatggcaccggcaatagcaccatcaagctgccctgccggatcaagcagatcatcaatatgtggcagcgcgtgggccagtgtatgtacgcccctccaatcgccggcaacatcatctgcagaagcaagatcaccggcctgctgctcacaagagatggcggcatcaacaagagcgaggaaatcttcagacccggcggaggcaacatgaaggacaattggagaagcgagctgtacaagtacaaggtggtggaaatcaagcccctgggcgtcgcccctacacggtgcaaaagaagagtggtcgagcggcggagaaggcggagagctgttgttggactgggagccgtgttcctgggctttcttggagccgccggatctacaatgggagccgcctctatcaccctgaccgtgcaggctagaaatctgctgagcggcatcgtccagcagcagagcaatctgctcagagcccctgaggcacagcaacacatgctgcagctgacagtgtggggaatcaagcagctgcaggccagagttctggccatcgagagatacctgagggaccagcagctcctcggcatctggggctgttctggcaagctgatctgctgtactgccgtgccttggaacagctcctggtccaacaagtcccaagaggacatctgggacaacatgacctggatgcagtgggacagagagatcagcaactacaccaacaccatctaccgcctgctggaagatagccagacacagcaagagaagaacgagaaggacctgctggccctggactgatgaggatcc

SEQ ID NO: 121 - DNA, 1995 bp, Artificial Sequence
  Description of Artificial Sequence: Synthetic polynucleotide
gtcgacgccaccatggatgctatgaagaggggcctgtgctgcgtgctgcttctgtgtggcgctgtgtttgtgtcccctagccaagagatccacgccagattcagaagaggcgccagagccgagaatctgtgggtcacagtgtactatggcgtgcccgtgtggaaagaggccaagaccacactgttctgtgccagcgacgccaaggcctacgatcccgaagtgcacaatgtgtgggccactcacgcctgcgtgcccaccgatcctaatcctcaagagatgttcctggaaaacgtgaccgagaacttcaacatgtggaagaacgacatggtcgagcagatgcaccaggacatcatcagcctgtggtcccagagcctgaagccttgcgtgaagctgacccctctgtgcgtgaccctgaattgcagcgacgtgatcaacagcaccggcaccatgaagaactgcagcttcagcgtgaccaccgagctgcgggacagaaagcagaagaagcacgccctgttctaccggctggacatcgtgcccctggacgagaacgacaacagcagcaaggactacagactgatcaactgcaacaccagcacatgcacccaggcctgtcctaaagtgaccttcgatcccattcctatccactactgtgcccctgccggctacgccatcctgaagtgcaacaacaagaccttcaacggcacaggcccctgcaacaacgtgtccaccgtgcagtgtacccacggcatcaagccagtggtgtctacccagctgctgctgaatggctctctggccgaggaagaagtgatcatcagaagcgagaacctgaccgacaacgtcaagaccatcatcgtgcagctgaaagaacccgtgggcatcaattgcacccggcctaacaacaacatccggcagagcatcagaatcggccctggccagacctttttcgccaccggcgatatcatcggcgacatcagagaggcccactgcaatatcagcagcaccaagtggcgggaaaccctgcagcaagttggaggcaagctggccaagtacttcaacaacaaaacgatcaagttcacccagcactctggcggcgacctggaaatcaccacacacagcttcaactgcagaggcgagttcttctactgtaataccagccagctgttcaactccacctacaacgagacaggctccatcaatggcaccggcaatagcaccatcaagctgccctgccggatcaagcagatcatcaatatgtggcaaggcgtgggccagtgtatgtacgcccctcctatcgccggcaacatcatctgcagaagcaagatcaccggcctgctgctcacaagagatggcggcatcaacaagagcgaggaaatcttcagacccggcggaggcaacatgaaggacaactggcgggacaattggcggagcgagctgtacaagtacaaggtggtcaagatcgagcccctgggcgtcgcacctacacggtgcaagagaagagtcgtgggacgtagacgaaggcggagagccgttggaatcggagccgtgttcctgggctttctgggagccgctggatctacaatgggcgctgccagcatgaccctgacagtgcaggctagaaatctgctgagcggcatcgtccagcagcagagcaatctgctcagagcccctgaggctcagcagcatctcctgaaactgaccgtgtggggaatcaagcagctgcaggccagagttctggccgtggaaagatacctgagggaccagcagctcctcggcatctggggctgttctggcaagctgatctgctgcaccaacgtgccctggaacagctcctggtccaacagaaacctgagcgagatctgggacaacatgacctggctgcagtgggacaaagagatcagcaactacacccagatcatctacggactgctggaagagagccagaaccagcaagagaaaaacgagcaggacctgctggccctggactgataaggatcc

SEQ ID NO: 122 - DNA, 1980 bp, Artificial Sequence
  Description of Artificial Sequence: Synthetic polynucleotide
gtcgacgccaccatggatgctatgaagaggggcctgtgctgcgtgctgcttctgtgtggcgctgtgtttgtgtcccctagccaagagatccacgccagattcagaagaggcgccagaaatctgtgggtcacagtgtactacggcgtgcccgtgtggaaagaggccaagaccacactgttctgtgccagcgacgccaaggcctacgatcccgaagtgcacaatgtgtgggccactcacgcctgcgtgcccaccgatcctaatcctcaagagatgttcctggaaaacgtgaccgagaacttcaacatgtggaagaacgacatggtcgagcagatgcaccaggacatcatcagcctgtggtcccagagcctgaagccttgcgtgaagctgacccctctgtgcgtgaccctgaattgcagcgacgtgatcaacagcaccggcaccatgaagaactgcagcttcagcgtgaccaccgagctgcgggacagaaagcagaagaagcacgccctgttctaccggctggacatcgtgcccctggacgagaacgacaacagcagcaaggactacagactgatcaactgcaacaccagcacatgcacccaggcctgtcctaaagtgaccttcgatcccattcctatccactactgtgcccctgccggctacgccatcctgaagtgcaacaacaagaccttcaacggcacaggcccctgcaacaacgtgtccaccgtgcagtgtacccacggcatcaagccagtggtgtctacccagctgctgctgaatggctctctggccgaggaagaagtgatcatcagaagcgagaacctgaccgacaacgtcaagaccatcatcgtgcagctgaaagaacccgtgggcatcaattgcacccggcctaacaacaacatccggcagagcatcagaatcggccctggccagacctttttcgccaccggcgatatcatcggcgacatcagagaggcccactgcaatatcagcagcaccaagtggcgggaaaccctgcagcaagttggaggcaagctggccaagtacttcaacaacaaaacgatcaagttcacccagcactctggcggcgacctggaaatcaccacacacagcttcaactgcagaggcgagttcttctactgtaataccagccagctgttcaactccacctacaacgagacaggctccatcaatggcaccggcaatagcaccatcaagctgccctgccggatcaagcagatcatcaatatgtggcaaggcgtgggccagtgtatgtacgcccctcctatcgccggcaacatcatctgcagaagcaagatcaccggcctgctgctcacaagagatggcggcatcaacaagagcgaggaaatcttcagacccggcggaggcaacatgaaggacaattggagaagcgagctgtacaagtacaaggtggtggaaatcaagcccctgggcgtcgcccctacaaagtgcaagagaagagtggtggaacggcggagaaggcggagagctgttgttggactgggagccgtgttcctgggctttcttggagccgccggatctacaatgggagccgcctctatcaccctgaccgtgcaggctagacagctgctgagcggaattgtccagcagcagaacaacctgctgagagcccctgaagcacagcaacacatgctgcagctgaccgtgtggggaatcaaacagctgcaggccagagtcctggccatcgagagatacctgaaggaccagcagctcctcggcatctggggctgttctggcaagctgatctgctgtactgccgtgccttggaacagctcctggtccaacaagtcccaagaggacatctgggacaacatgacctggatgcagtgggacagagagatcagcaactacaccaacaccatctaccgcctgctggaagatagccagacacagcaagagaaaaacgagaaggacctgctggccctggactgatgaggatcc

SEQ ID NO: 123 - DNA, 1980 bp, Artificial Sequence
  Description of Artificial Sequence: Synthetic polynucleotide
gtcgacgccaccatggatgctatgaagaggggcctgtgctgcgtgctgcttctgtgtggcgctgtgtttgtgtcccctagccaagagatccacgccagattcagaagaggcgccagaaatctgtgggtcacagtgtactacggcgtgcccgtgtggaaagaggcctgcaccacactgttttgtgccagcgacgccaaggcctacgatcccaaagtgcggaatgtgtgggccactcactgctgcgtgcccaccgatcctaatcctcaagagatgttcctggaaaacgtgaccgagaacttcaacatgtggaagaacgacatggtcgagcagatgcaccaggacatcatcagcctgtggtcccagagcctgaagccttgcgtgaagctgacccctctgtgcgtgaccctgaattgcagcgacgtgatcaacagcaccggcaccatgaagaactgcagcttcagcgtgaccaccgagctgcgggacagaaagcagaagaagcacgccctgttctaccggctggacatcgtgcccctggacgagaacgacaacagcagcaaggactacagactgatcaactgcaacaccagcacatgcacccaggcctgtcctaaagtgaccttcgatcccattcctatccactactgtgcccctgccggctacgccatcctgaagtgcaacaacaagaccttcaacggcacaggcccctgcaacaacgtgtccaccgtgcagtgtacccacggcatcaagccagtggtgtctacccagctgctgctgaatggctctctggccgaggaagaagtgatcatcagaagcgagaacctgaccgacaacgtcaagaccatcatcgtgcagctgaaagaacccgtgggcatcaattgcacccggcctaacaacaacatccggcagagcatcagaatcggccctggccagacttggtttgccaccggcgatatcatcggcgacatcagagaggcccactgcaatatcagcagcaccaagtggcgggaaaccctgcagcaagttggaggcaagctggccaagtacttcaacaacaaaacgatcaagttcacccagcactctggcggcgacctggaaatcaccacacacagcttcaactgcagaggcgagttcttctactgtaataccagccagctgttcaactccacctacaacgagacaggctccatcaatggcaccggcaatagcaccatcaagctgccctgccggatcaagcagatcatcaatatgtggcaaggcgtgggccagtgtatgtacgcccctcctatcgccggcaacatcatctgcagaagcaagatcaccggcctgctgctcacaagagatggcggcatcaacaagagcgaggaaatcttcagacccggcggaggcaacatgaaggacaattggagaagcgagctgtacaagtacaaggtggtggaaatcaagcccctgggcgtcgcccctacaaagtgcaagagaagagtggtggaacggcggagaaggcggagagctgttgttggactgggagccgtgttcctgggctttcttggagccgccggatctacaatgggagccgcctctatgaccctgaccgtgcaggctagacagctgctgagcggaattgtccagcagcagaacaactgcctgagagcccctgagtgccagcagtgtatgctgcagctgacagtgtggggaatcaagcagctgcaggccagagttctggccatcgagagatacctgaaggaccagcagctcctcggcatctggggctgttctggcaagctgatctgctgtactgccgtgccttggaacagctcctggtccaacaagtcccaagaggacatctgggacaacatgacctggatgcagtgggacagagagatcagcaactacaccaacaccatctaccgcctgctggaagatagccagacacagcaagagaaaaacgagaaggacctgctggccctggactgatgaggatcc

SEQ ID NO: 124 - DNA, 1941 bp, Artificial Sequence
  Description of Artificial Sequence: Synthetic polynucleotide
gtcgacgccaccatggatgctatgaagaggggcctgtgctgcgtgctgcttctgtgtggcgctgtgtttgtgtcccctagccaagagatccacgccagattcagaagaggcgccagaaatctgtgggtcacagtgtactacggcgtgcccgtgtggaaagaggccaagaccacactgttctgtgccagcgacgccaaggcctacgatcccgaagtgcacaatgtgtgggccactcacgcctgcgtgcccaccgatcctaatcctcaagagatgttcctggaaaacgtgaccgagaacttcaacatgtggaagaacgacatggtcgagcagatgcaccaggacatcatcagcctgtggtcccagagcctgaagccttgcgtgaagctgacccctctgtgcgtgaccctgaattgcagcgacgtgatcaacagcaccggcaccatgaagaactgcagcttcagcgtgaccaccgagctgcgggacagaaagcagaagaagcacgccctgttctaccggctggacatcgtgcccctggacgagaacgacaacagcagcaaggactacagactgatcaactgcaacaccagcacatgcacccaggcctgtcctaaagtgaccttcgatcccattcctatccactactgtgcccctgccggctacgccatcctgaagtgcaacaacaagaccttcaacggcacaggcccctgcaacaacgtgtccaccgtgcagtgtacccacggcatcaagccagtggtgtctacccagctgctgctgaatggctctctggccgaggaagaagtgatcatcagaagcgagaacctgaccgacaacgtcaagaccatcatcgtgcagctgaaagaacccgtgggcatcaattgcacccggcctaacaacaacatccggcagagcatcagaatcggccctggccagacctttttcgccaccggcgatatcatcggcgacatcagagaggcccactgcaatatcagcagcaccaagtggcgggaaaccctgcagcaagttggaggcaagctggccaagtacttcaacaacaaaacgatcaagttcacccagcactctggcggcgacctggaaatcaccacacacagcttcaactgcagaggcgagttcttctactgtaataccagccagctgttcaactccacctacaacgagacaggctccatcaatggcaccggcaatagcaccatcaagctgccctgccggatcaagcagatcatcaatatgtggcaaggcgtgggccagtgtatgtacgcccctcctatcgccggcaacatcatctgcagaagcaagatcaccggcctgctgctcacaagagatggcggcatcaacaagagcgaggaaatcttcagacccggcggaggcaacatgaaggacaattggagaagcgagctgtacaagtacaaggtggtggaaatcaagcccctgggcgtcgcccctacaaagtgcaagagaagagtggtggaacggcggagaaggcggagagctgttgttggactgggagccgtgttcctgggctttcttggagccgccggatctacaatgggagccgcctctatcaccctgaccgtgcaggctagacagctgctgagcggcaatcctgactggctgcctgatatgaccgtgtggggaatcaagcagctgcaggccagagttctggccatcgagagatacctgaaggaccagcagctcctcggcatctggggctgttctggcaagctgatctgctgtactgccgtgccttggaacagctcctggtccaacaagtcccaagaggacatctgggacaacatgacctggatgcagtgggacagagagatcagcaactacaccaacaccatctaccgcctgctggaagatagccagacacagcaagagaaaaacgagaaggacctgctggccctggactgatgaggatcc

SEQ ID NO: 125 - DNA, 1980 bp, Artificial Sequence
  Description of Artificial Sequence: Synthetic polynucleotide
gtcgacgccaccatggatgctatgaagaggggcctgtgctgcgtgctgcttctgtgtggcgctgtgtttgtgtcccctagccaagagatccacgccagattcagaagaggcgccagaaatctgtgggtcacagtgtactacggcgtgcccgtgtggaaggatgccgagacaacactgttctgtgccagcgacgccaaggcctacgatcccgagaaacacaacgtgtgggccactcacgcctgcgtgccaaccgatcctaatcctcaagagatgttcctggaaaacgtgaccgagaacttcaacatgtggaagaacgacatggtcgagcagatgcacaccgacatcatcagcctgtggtcccagagcctgaagccttgcgtgaagctgacccctctgtgcgtgaccctgaattgcagcgacgtgatcaacagcaccggcaccatgaagaactgcagcttcagcgtgaccaccgagctgcgggacagaaagcagaaagtgcacgccctgttctaccggctggacatcgttcctctggacgagaacgacaacagcagcaaggactacagactgatcaactgcaacaccagcacatgcacccaggcctgtcctaaagtgaccttcgatcccattcctatccactactgtgcccctgccggctacgccatcctgaagtgcaacaacaagaccttcaacggcacaggcccctgcaacaacgtgtccaccgtgcagtgtacccacggcatcaagccagtggtgtctacccagctgctgctgaatggctctctggccgaggaagaagtgatcatcagaagcgagaacctgaccgacaacgtcaagaccatcatcgtgcagctgaaagaacccgtgggcatcaattgcacccggcctaacaacaacatccggcagagcatcagaatcggccctggccagacctttttcgccaccggcgatatcatcggcgacatcagagaggcccactgcaatatcagcagcaccaagtggcgggaaaccctgcagcaagttggaggcaagctggccaagtacttcaacaacaaaacgatcaagttcacccagcactctggcggcgacctggaaatcaccacacacagcttcaactgcagaggcgagttcttctactgtaataccagccagctgttcaactccacctacaacgagacaggctccatcaatggcaccggcaatagcaccatcaagctgccctgccggatcaagcagatcatcaatatgtggcagcgcgtgggccagtgtatgtacgcccctccaatcgccggcaacatcatctgcagaagcaagatcaccggcctgctgctcacaagagatggcggcatcaacaagagcgaggaaatcttcagacccggcggaggcaacatgaaggacaattggagaagcgagctgtacaagtacaaggtggtggaaatcaagcccctgggcgtcgcccctacacggtgcaaaagaagagtggtcgagcggcggagaaggcggagagctgttgttggactgggagccgtgttcctgggctttcttggagccgccggatctacaatgggagccgcctctatcaccctgaccgtgcaggctagaaatctgctgagcggcatcgtccagcagcagagcaatctgctcagagcccctgaggcacagcaacacatgctgcagctgacagtgtggggaatcaagcagctgcaggccagagttctggccatcgagagatacctgagggaccagcagctcctcggcatctggggctgttctggcaagctgatctgctgtactgccgtgccttggaacagctcctggtccaacaagtcccaagaggacatctgggacaacatgacctggatgcagtgggacagagagatcagcaactacaccaacaccatctaccgcctgctggaagatagccagacacagcaagagaagaacgagaaggacctgctggccctggactgatgaggatcc

SEQ ID NO: 126 - DNA, 1971 bp, Artificial Sequence
  Description of Artificial Sequence: Synthetic polynucleotide
gtcgacgccaccatgcctatgggatctctgcagcctctggccacactgtacctgctgggaatgctggtggctagcgtgctggccaagggaaagctgtgggtcacagtgtactacggcgtgcccgtgtggaaagaggccaagaccacactgttctgcgcctccgatgccagagcctacgagaaagaggtgcacaacgtctgggccacacacgcctgtgtgcctaccgatccatctcctcaagagctgttcctgaagaacgtgaccgagaacttcaacatgtggaagaacgacatggtggaccagatgcacgaggacatcatcagcctgtgggaccagagcctgaagccttgcgtgaagctgacccctctgtgcgtgaccctgatctgcagcaatgccaccgtgaagaaccggaccgtggaagagatgaagaactgcagcttcaacaccaccaccgagatccgggacaaagagaagaaagagtacgccctgttctacaagcccgacgtggtgcccctggacgagacaaacaataccagcgagtaccggctgatcaactgcaacaccagcgcctgcactcaggcctgtcctaaagtgaccttcgagcccattcctatccactactgtgcccctgccggctacgccatcctgaagtgcaacaacgagacattcaacggcacaggcccctgcagcaacgtgtccacagtgcagtgtacccacggcatcagacccgtggtgtctacacagctgctgctgaatggaagcctggccgagaaagaaatcgtgatcagaagcgagaacctgaccaacaacgccaagatcatcatcgtgcacctgaacacccctgtggaaatcgtgtgcacccggcctaacaacaacaccagaaagagcgtgcggatcggccctggccagaccttttatgccaccggcgatatcatcggcgacatcagacaggcccactgtaacatcagcgagaagcagtggaacgacaccctgcagaaagtgggcaaagagctgaagaagcacttccccaacaagaccattaagtacgcccagagcgctggcggcgacatggaaatcaccacacacagcttcaattgtggcggcgagttcttctactgcaataccgccaagctgttcaacggaacctacaacggcaccgacatcagcaccaacagcagcgccgacagcaacagcaccatcactctgcagtgccggatcaagcagatcatcaatatgtggcaaggcgtcggccggtgtatgtacgcccctcctatcgccggcaacatcacatgcaagagccacatcacaggcctgctgctcacaagagatggcggcacaaacagctccggcaaagaggaaatcttccggcctgccggcggagacatgcgggataattggagaagcgagctgtacaagtacaaggtggtggaaatccagccactgggaatcgccccaacaggctgcaagagaagagtggtcgagcggagaagaaggcggagagctgctggactgggtgccctgtttctgggctttcttggagccgccggaagcacaatgggagccgcctctattaccctgaccgtgcaggctagacagctgctctctggaatcgtgcagcagcagagcaacctgctgagagcccctgaagctcagcagcacatgctgcagctgacagtgtggggcatcaagcagctgcaggcaagagtgctggccctggaaagatacctgaaggatcagcagctcctcggcatgtggggctgttctggcaagctgatctgctgcaccaacgtgccctggaacacctcttggagcaacaagagcgagacagacatctgggacaacatgacctggatgcagtgggagagagagatcagcaactacaccgagacaatctacaaactgctcgaggacagccagaaccagcaagagagaaacgagcaggacctgctggctctggactgatgaggatcc

SEQ ID NO: 127 - DNA, 2004 bp, Artificial Sequence
  Description of Artificial Sequence: Synthetic polynucleotide
gtcgacgccaccatggatgctatgaagaggggcctgtgctgcgtgctgcttctgtgtggcgctgtgtttgtgtcccctagccaagagatccacgccagattcagaagaggcgccagaaagggaaagctgtgggtcacagtgtactacggcgtgcccgtgtggaaagaggccaagaccacactgttctgcgcctccgatgccagagcctacgagaaagaggtgcacaacgtctgggccacacacgcctgtgtgcctaccgatccatctcctcaagagctgttcctgaagaacgtgaccgagaacttcaacatgtggaagaacgacatggtggaccagatgcacgaggacatcatcagcctgtgggaccagagcctgaagccttgcgtgaagctgacccctctgtgcgtgaccctgatctgcagcaatgccaccgtgaagaaccggaccgtggaagagatgaagaactgcagcttcaacaccaccaccgagatccgggacaaagagaagaaagagtacgccctgttctacaagcccgacgtggtgcccctggacgagacaaacaataccagcgagtaccggctgatcaactgcaacaccagcgcctgcactcaggcctgtcctaaagtgaccttcgagcccattcctatccactactgtgcccctgccggctacgccatcctgaagtgcaacaacgagacattcaacggcacaggcccctgcagcaacgtgtccacagtgcagtgtacccacggcatcagacccgtggtgtctacacagctgctgctgaatggaagcctggccgagaaagaaatcgtgatcagaagcgagaacctgaccaacaacgccaagatcatcatcgtgcacctgaacacccctgtggaaatcgtgtgcacccggcctaacaacaacaccagaaagagcgtgcggatcggccctggccagaccttttatgccaccggcgatatcatcggcgacatcagacaggcccactgtaacatcagcgagaagcagtggaacgacaccctgcagaaagtgggcaaagagctgaagaagcacttccccaacaagaccattaagtacgcccagagcgctggcggcgacatggaaatcaccacacacagcttcaattgtggcggcgagttcttctactgcaataccgccaagctgttcaacggaacctacaacggcaccgacatcagcaccaacagcagcgccgacagcaacagcaccatcactctgcagtgccggatcaagcagatcatcaatatgtggcaaggcgtcggccggtgtatgtacgcccctcctatcgccggcaacatcacatgcaagagccacatcacaggcctgctgctcacaagagatggcggcacaaacagctccggcaaagaggaaatcttccggcctgccggcggagacatgcgggataattggagaagcgagctgtacaagtacaaggtggtggaaatccagccactgggaatcgccccaacaggctgcaagagaagagtggtcgagcggagaagaaggcggagagctgctggactgggtgccctgtttctgggctttcttggagccgccggaagcacaatgggagccgcctctattaccctgaccgtgcaggctagacagctgctctctggaatcgtgcagcagcagagcaacctgctgagagcccctgaagctcagcagcacatgctgcagctgacagtgtggggcatcaagcagctgcaggcaagagtgctggccctggaaagatacctgaaggatcagcagctcctcggcatgtggggctgttctggcaagctgatctgctgcaccaacgtgccctggaacacctcttggagcaacaagagcgagacagacatctgggacaacatgacctggatgcagtgggagagagagatcagcaactacaccgagacaatctacaaactgctcgaggacagccagaaccagcaagagagaaacgagcaggacctgctggctctggactgatgaggatcc

SEQ ID NO: 128 - DNA, 1971 bp, Artificial Sequence
  Description of Artificial Sequence: Synthetic polynucleotide
gtcgacgccaccatgcctatgggatctctgcagcctctggccacactgtacctgctgggaatgctggtggcttctgtgctggccgccgagaatctgtgggtcacagtgtactatggcgtgcccgtgtggaaagaggccaagaccacactgttctgcgcctccgatgccagagcctacgagaaagaggtgcacaacgtctgggccacacacgcctgtgtgcctaccgatccatctcctcaagagctgttcctgaagaacgtgaccgagaacttcaacatgtggaagaacgacatggtggaccagatgcacgaggacatcatcagcctgtgggaccagagcctgaagccttgcgtgaagctgacccctctgtgcgtgaccctgatctgcagcaatgccaccgtgaagaaccggaccgtggaagagatgaagaactgcagcttcaacaccaccaccgagatccgggacaaagagaagaaagagtacgccctgttctacaagcccgacgtggtgcccctggacgagacaaacaataccagcgagtaccggctgatcaactgcaacaccagcgcctgcactcaggcctgtcctaaagtgaccttcgagcccattcctatccactactgtgcccctgccggctacgccatcctgaagtgcaacaacgagacattcaacggcacaggcccctgcagcaacgtgtccacagtgcagtgtacccacggcatcagacccgtggtgtctacacagctgctgctgaatggaagcctggccgagaaagaaatcgtgatcagaagcgagaacctgaccaacaacgccaagatcatcatcgtgcacctgaacacccctgtggaaatcgtgtgcacccggcctaacaacaacaccagaaagagcgtgcggatcggccctggccagaccttttatgccaccggcgatatcatcggcgacatcagacaggcccactgtaacatcagcgagaagcagtggaacgacaccctgcagaaagtgggcaaagagctgaagaagcacttccccaacaagaccattaagtacgcccagagcgctggcggcgacatggaaatcaccacacacagcttcaattgtggcggcgagttcttctactgcaataccgccaagctgttcaacggaacctacaacggcaccgacatcagcaccaacagcagcgccgacagcaacagcaccatcactctgcagtgccggatcaagcagatcatcaatatgtggcaaggcgtcggccggtgtatgtacgcccctcctatcgccggcaacatcacatgcaagagccacatcacaggcctgctgctcacaagagatggcggcacaaacagctccggcaaagaggaaatcttccggcctgccggcggagacatgcgggataattggagaagcgagctgtacaagtacaaggtggtcaagatcgagcccctgggcgtcgcacctacacggtgcaagagaagagtcgtgggccgtcgtagaaggcggagagccgttggaattggcgccgtgttcctgggctttctgggagccgctggatctacaatgggcgctgccagcatgaccctgacagtgcaggctagaaatctgctgagcggcatcgtgcagcagcagagcaatctgctcagagcccctgaggctcagcagcacctcctgaaactgacagtgtggggcatcaagcagctgcaggcaagagtgctggcagtggaaagatacctgcgggaccagcagctcctcggaatctggggatgtagcggcaagctgatctgctgcaccaacgtgccctggaacagcagctggtccaacagaaacctgagcgagatctgggataacatgacctggctgcagtgggacaaagaaatcagcaactacacccagatcatctacggcctgctggaagagagccagaaccagcaagagaaaaacgagcaggacctgctggccctggactgataaggatcc

SEQ ID NO: 129 - DNA, 2013 bp, Artificial Sequence
  Description of Artificial Sequence: Synthetic polynucleotide
gtcgacgccaccatgcctatgggatctctgcagcctctggccacactgtacctgctgggaatgctggtggcttctgtgctggccgagggcaatctgtgggtcacagtgtactatggcgtgcccgtgtggaaagaggccaagaccacactgttctgtgccagcgacgccaaggcctacaagaaagaggtgcacaacgtctgggccacacacgcctgtgtgcctaccgatccatctcctcaagagctgttcctgaagaacgtgaccgagaacttcaacatgtggaagaacgacatggtggaccagatgcacgaggacatcatcagcctgtgggaccagagcctgaagccttgcgtgaagctgacccctctgtgcgtgaccctgatctgcagcaacgccatcgtgaagaacagcaccaccgagaagatgagcaatgtgaccgtgaacaacatcaccattgaggaaatgaagaactgcagcttcaacaccaccacagagatccgggacaagattaagaaagagcgggccctgttctacagacccgacatcgtgcccctgaacgacgagacaaacaacaccagcaagtaccggctgatcaactgcaacacctccgcctgcactcaggcctgtcctaaagtgaccttcgagcccattcctatccactactgtgcccctgccggctatgccatcctgaagtgcaacgacgaaaccttcaacggcacaggcccctgcagcaatgtgtccaccgtgcagtgtacccacggcatcagaccagtggtgtctacccagctgctgctgaatggaagcctggccgagaaagaaatcgtgatcagaagcgagaacctgaccaacaacgccaagatcatcattgtgcatctgcacgcccctgtggaaatcgtgtgcacccggccttacaacaacacccggaagtctgtgcggatcggccctggccagacattctatgccaccggcgatatcatcggcgaccctagacaggcccactgtaacatcagcaaagagatctggaacaagaccctgcaagaagtgggcaaagagctgcagaagcacttccccaacaagaccatccggtacaaccagtctgccggcggagacatggaaatcaccacacacagcttcaattgtggcggcgagttcttctactgcaataccagcaacctgttcaacagcacctacaacgacacctacatcagccccaactccaccaatagcaccagcatcatcaccctgcagtgcaagatcaagcagatcatcaatatgtggcaaggcgtcggccggtgtatgtacgcccctcctatcgccggcaacatcacatgcaagagcaatatcaccggcctgctgctcaccagagatggcggcattaacaacgtgtccaacgagacagagacattcagacccgctggcggcgacatgcgggacaattggagaagcgagctgtacaagtacaaggtggtggaagtgcagcccctgggaatcgctcctaccggctgcaagagaagagtggtggaaagacgcagacggcggagagctgttggactgggtgctctgttcctgggctttctgggagccgccggatctacaatgggagctgccagcatcacactgaccgtgcaggctagacagctgctgagcggaattgtgcagcagcagagcaacctgctgagagcccctgaagcacagcagcacatgctgcagctgacagtgtggggcatcaaacagctgcaggccagagtgctggccctggaaagatacctgaaggaccagcagctcctcggaatctggggctgttctggcaagctgatctgctgcaccaacgtgccctggaacacctcctggtccaacaagagcgagacagacatttggaacaacatgacctggatgcagtgggagagagagatcagcaactacaccggcaccatctacaagctgctggaagatagccagaaccagcaagagcggaacgagaaggacctgctggctctggactgatgaggatcc

SEQ ID NO: 130 - DNA, 2046 bp, Artificial Sequence
  Description of Artificial Sequence: Synthetic polynucleotide
gtcgacgccaccatggatgctatgaagaggggcctgtgctgcgtgctgcttctgtgtggcgctgtgtttgtgtcccctagccaagagatccacgccagattcagaagaggcgccagagagggcaatctgtgggtcacagtgtactatggcgtgcccgtgtggaaagaggccaagaccacactgttctgtgccagcgacgccaaggcctacaagaaagaggtgcacaacgtctgggccacacacgcctgtgtgcctaccgatccatctcctcaagagctgttcctgaagaacgtgaccgagaacttcaacatgtggaagaacgacatggtggaccagatgcacgaggacatcatcagcctgtgggaccagagcctgaagccttgcgtgaagctgacccctctgtgcgtgaccctgatctgcagcaacgccatcgtgaagaacagcaccaccgagaagatgagcaatgtgaccgtgaacaacatcaccattgaggaaatgaagaactgcagcttcaacaccaccacagagatccgggacaagattaagaaagagcgggccctgttctacagacccgacatcgtgcccctgaacgacgagacaaacaacaccagcaagtaccggctgatcaactgcaacacctccgcctgcactcaggcctgtcctaaagtgaccttcgagcccattcctatccactactgtgcccctgccggctatgccatcctgaagtgcaacgacgaaaccttcaacggcacaggcccctgcagcaatgtgtccaccgtgcagtgtacccacggcatcagaccagtggtgtctacccagctgctgctgaatggaagcctggccgagaaagaaatcgtgatcagaagcgagaacctgaccaacaacgccaagatcatcattgtgcatctgcacgcccctgtggaaatcgtgtgcacccggccttacaacaacacccggaagtctgtgcggatcggccctggccagacattctatgccaccggcgatatcatcggcgaccctagacaggcccactgtaacatcagcaaagagatctggaacaagaccctgcaagaagtgggcaaagagctgcagaagcacttccccaacaagaccatccggtacaaccagtctgccggcggagacatggaaatcaccacacacagcttcaattgtggcggcgagttcttctactgcaataccagcaacctgttcaacagcacctacaacgacacctacatcagccccaactccaccaatagcaccagcatcatcaccctgcagtgcaagatcaagcagatcatcaatatgtggcaaggcgtcggccggtgtatgtacgcccctcctatcgccggcaacatcacatgcaagagcaatatcaccggcctgctgctcaccagagatggcggcattaacaacgtgtccaacgagacagagacattcagacccgctggcggcgacatgcgggacaattggagaagcgagctgtacaagtacaaggtggtggaagtgcagcccctgggaatcgctcctaccggctgcaagagaagagtggtggaaagacgcagacggcggagagctgttggactgggtgctctgttcctgggctttctgggagccgccggatctacaatgggagctgccagcatcacactgaccgtgcaggctagacagctgctgagcggaattgtgcagcagcagagcaacctgctgagagcccctgaagcacagcagcacatgctgcagctgacagtgtggggcatcaaacagctgcaggccagagtgctggccctggaaagatacctgaaggaccagcagctcctcggaatctggggctgttctggcaagctgatctgctgcaccaacgtgccctggaacacctcctggtccaacaagagcgagacagacatttggaacaacatgacctggatgcagtgggagagagagatcagcaactacaccggcaccatctacaagctgctggaagatagccagaaccagcaagagcggaacgagaaggacctgctggctctggactgatgaggatcc

SEQ ID NO: 131 - DNA, 2013 bp, Artificial Sequence
  Description of Artificial Sequence: Synthetic polynucleotide
gtcgacgccaccatgcctatgggatctctgcagcctctggccacactgtacctgctgggaatgctggtggcttctgtgctggccgccgagaatctgtgggtcacagtgtactatggcgtgcccgtgtggaaagaggccaagaccacactgttctgtgccagcgacgccaaggcctacaagaaagaggtgcacaacgtctgggccacacacgcctgtgtgcctaccgatccatctcctcaagagctgttcctgaagaacgtgaccgagaacttcaacatgtggaagaacgacatggtggaccagatgcacgaggacatcatcagcctgtgggaccagagcctgaagccttgcgtgaagctgacccctctgtgcgtgaccctgatctgcagcaacgccatcgtgaagaacagcaccaccgagaagatgagcaatgtgaccgtgaacaacatcaccattgaggaaatgaagaactgcagcttcaacaccaccacagagatccgggacaagattaagaaagagcgggccctgttctacagacccgacatcgtgcccctgaacgacgagacaaacaacaccagcaagtaccggctgatcaactgcaacacctccgcctgcactcaggcctgtcctaaagtgaccttcgagcccattcctatccactactgtgcccctgccggctatgccatcctgaagtgcaacgacgaaaccttcaacggcacaggcccctgcagcaatgtgtccaccgtgcagtgtacccacggcatcagaccagtggtgtctacccagctgctgctgaatggaagcctggccgagaaagaaatcgtgatcagaagcgagaacctgaccaacaacgccaagatcatcattgtgcatctgcacgcccctgtggaaatcgtgtgcacccggccttacaacaacacccggaagtctgtgcggatcggccctggccagacattctatgccaccggcgatatcatcggcgaccctagacaggcccactgtaacatcagcaaagagatctggaacaagaccctgcaagaagtgggcaaagagctgcagaagcacttccccaacaagaccatccggtacaaccagtctgccggcggagacatggaaatcaccacacacagcttcaattgtggcggcgagttcttctactgcaataccagcaacctgttcaacagcacctacaacgacacctacatcagccccaactccaccaatagcaccagcatcatcaccctgcagtgcaagatcaagcagatcatcaatatgtggcaaggcgtcggccggtgtatgtacgcccctcctatcgccggcaacatcacatgcaagagcaatatcaccggcctgctgctcaccagagatggcggcattaacaacgtgtccaacgagacagagacattcagacccgctggcggcgacatgcgggacaattggagaagcgagctgtacaagtacaaggtggtcaagatcgagcccctgggcgtcgcaccaacacggtgcaagagaagagtcgtgggccgtcgtagaaggcggagagccgttggaattggcgccgtgttcctgggctttctgggagccgctggatctacaatgggcgctgccagcatgacactgaccgtgcaggctagaaatctgctgagcggcatcgtgcagcagcagagcaatctgctcagagcccctgaggctcagcagcacctcctgaaactgacagtgtggggcatcaagcagctgcaggcaagagtgctggcagtggaaagatacctgcgggaccagcagctcctcggaatctggggatgtagcggcaagctgatctgctgcaccaacgtgccctggaactccagctggtccaacagaaacctgagcgagatctgggataacatgacctggctgcagtgggacaaagaaatcagcaactacacccagatcatctacggactgctggaagagagccagaaccagcaagagaaaaacgagcaggacctgctggccctggactgataaggatcc

SEQ ID NO: 132 - DNA, 1974 bp, Artificial Sequence
  Description of Artificial Sequence: Synthetic polynucleotide
gtcgacgccaccatgcctatgggatctctgcagcctctggccacactgtacctgctgggaatgctggtggcttctgtgctggccgagggcaatctgtgggtcacagtgtactatggcgtgcccgtgtggaaagaggccaagaccacactgttctgtgccagcgacgccaaggcctacgtgaaagaggtgcacaacgtctgggccacacacgcctgtgtgcctaccgatccatctcctcaagagctgttcctgaagaacgtgaccgagaacttcaacatgtggaagaacgacatggtggaccagatgcacgaggacatcatcagcctgtgggaccagagcctgaagccttgcgtgaagctgacccctctgtgcgtgaccctgatctgtagcaccgccaccgtgaacaacagcaagttcgaggaaatgaagaactgcagcttcaacaccaccaccgagatccgggacaaagagaagaaagagtacgccctgttctacaggcccgacatcgtgcccctggacaacgagacaagcaacatcagcgagtaccggctgatcaactgcaacaccagcgcctgcactcaggcctgtcctaaagtgaccttcgagcccattcctatccactactgtgcccctgccggctacgccatcctgaagtgcaacgacgagacattcaacggcacaggcccctgcagcaatgtgtccaccgtgcagtgtacccacggcatcagaccagtggtgtctacccagctgctgctgaatggaagcctggccgagaaagaaatcgtgatcagaagcgagaacctgaccaacaacgccaagatcatcattgtgcatctgcacacccctgtggaaatcgtgtgcacccggcctaacaacaacaccagaaagagcgtgcggatcggccctggccagaccttttatgccaccggcgacatcatcggcaaccccagacaggcccactgtaacatcagcaaagagcggtggaacgacaccctgcagaaagtgggcaaagagctgcagaagcacttccccaacaagaccatcaagtacaaccagagcgctggcggcgacatggaaatcaccacacacagcttcaattgtggcggcgagttcttctactgcaatacctccaacctgttcaacagcacctacaacgacacctacatcagcaccaactccaccaatagcaccagctacattaccctgcagtgccggatcaagcagatcatcaatatgtggcaaggcgtcggccggtgtatgtacgcccctcctatcgccggcaacatcacatgcaagtccaacatcaccggcctgctgctcacaagagatggcggcatcaacaaggacagcaacgaaaccgaaaccttccggcctgccggcggagacatgagagacaattggagaagcgagctgtacaagtacaaggtggtggaagtgcagcccctgggaatcgctcctaccggctgcaagagaagagtggtggaaagacgcagacggcggagagctgctggactgggtgctctgtttctgggctttctgggagccgccggatctacaatgggagctgccagcatcaccctgaccgtgcaggctagacaactgctgtctggcatcgtgcagcagcagagcaacctgctgagagcccctgaagctcagcagcacatgctgcagctgacagtgtggggcatcaaacagctgcaggccagagttctggccctggaaagatacctgaaggatcagcagctcctcggcatgtggggctgttctggcaagctgatctgctgcaccaacgtgccctggaacacctcctggtccaacaagagcgagacagacatctgggacaacatgacctggatgcagtgggagagagagatcagcaactacaccggcaccatctacaagctgctcgaggacagccagaaccagcaagagagaaacgagcaggacctgctggctctggactgatgaggatcc

SEQ ID NO: 133 - DNA, 2007 bp, Artificial Sequence
  Description of Artificial Sequence: Synthetic polynucleotide
gtcgacgccaccatggatgctatgaagaggggcctgtgctgcgtgctgcttctgtgtggcgctgtgtttgtgtcccctagccaagagatccacgccagattcagaagaggcgccagagagggcaatctgtgggtcacagtgtactatggcgtgcccgtgtggaaagaggccaagaccacactgttctgtgccagcgacgccaaggcctacgtgaaagaggtgcacaacgtctgggccacacacgcctgtgtgcctaccgatccatctcctcaagagctgttcctgaagaacgtgaccgagaacttcaacatgtggaagaacgacatggtggaccagatgcacgaggacatcatcagcctgtgggaccagagcctgaagccttgcgtgaagctgacccctctgtgcgtgaccctgatctgtagcaccgccaccgtgaacaacagcaagttcgaggaaatgaagaactgcagcttcaacaccaccaccgagatccgggacaaagagaagaaagagtacgccctgttctacaggcccgacatcgtgcccctggacaacgagacaagcaacatcagcgagtaccggctgatcaactgcaacaccagcgcctgcactcaggcctgtcctaaagtgaccttcgagcccattcctatccactactgtgcccctgccggctacgccatcctgaagtgcaacgacgagacattcaacggcacaggcccctgcagcaatgtgtccaccgtgcagtgtacccacggcatcagaccagtggtgtctacccagctgctgctgaatggaagcctggccgagaaagaaatcgtgatcagaagcgagaacctgaccaacaacgccaagatcatcattgtgcatctgcacacccctgtggaaatcgtgtgcacccggcctaacaacaacaccagaaagagcgtgcggatcggccctggccagaccttttatgccaccggcgacatcatcggcaaccccagacaggcccactgtaacatcagcaaagagcggtggaacgacaccctgcagaaagtgggcaaagagctgcagaagcacttccccaacaagaccatcaagtacaaccagagcgctggcggcgacatggaaatcaccacacacagcttcaattgtggcggcgagttcttctactgcaatacctccaacctgttcaacagcacctacaacgacacctacatcagcaccaactccaccaatagcaccagctacattaccctgcagtgccggatcaagcagatcatcaatatgtggcaaggcgtcggccggtgtatgtacgcccctcctatcgccggcaacatcacatgcaagtccaacatcaccggcctgctgctcacaagagatggcggcatcaacaaggacagcaacgaaaccgaaaccttccggcctgccggcggagacatgagagacaattggagaagcgagctgtacaagtacaaggtggtggaagtgcagcccctgggaatcgctcctaccggctgcaagagaagagtggtggaaagacgcagacggcggagagctgctggactgggtgctctgtttctgggctttctgggagccgccggatctacaatgggagctgccagcatcaccctgaccgtgcaggctagacaactgctgtctggcatcgtgcagcagcagagcaacctgctgagagcccctgaagctcagcagcacatgctgcagctgacagtgtggggcatcaaacagctgcaggccagagttctggccctggaaagatacctgaaggatcagcagctcctcggcatgtggggctgttctggcaagctgatctgctgcaccaacgtgccctggaacacctcctggtccaacaagagcgagacagacatctgggacaacatgacctggatgcagtgggagagagagatcagcaactacaccggcaccatctacaagctgctcgaggacagccagaaccagcaagagagaaacgagcaggacctgctggctctggactgatgaggatcc

SEQ ID NO: 134 - DNA, 1974 bp, Artificial Sequence
  Description of Artificial Sequence: Synthetic polynucleotide
gtcgacgccaccatgcctatgggatctctgcagcctctggccacactgtacctgctgggaatgctggtggcttctgtgctggccgccgagaatctggtcacagtgtactatggcgtgcccgtgtggaaagaggccaagaccacactgttctgtgccagcgacgccaaggcctacgtgaaagaggtgcacaacgtctgggccacacacgcctgtgtgcctaccgatccatctcctcaagagctgttcctgaagaacgtgaccgagaacttcaacatgtggaagaacgacatggtggaccagatgcacgaggacatcatcagcctgtgggaccagagcctgaagccttgcgtgaagctgacccctctgtgcgtgaccctgatctgtagcaccgccaccgtgaacaacagcaagttcgaggaaatgaagaactgcagcttcaacaccaccaccgagatccgggacaaagagaagaaagagtacgccctgttctacaggcccgacatcgtgcccctggacaacgagacaagcaacatcagcgagtaccggctgatcaactgcaacaccagcgcctgcactcaggcctgtcctaaagtgaccttcgagcccattcctatccactactgtgcccctgccggctacgccatcctgaagtgcaacgacgagacattcaacggcacaggcccctgcagcaatgtgtccaccgtgcagtgtacccacggcatcagaccagtggtgtctacccagctgctgctgaatggaagcctggccgagaaagaaatcgtgatcagaagcgagaacctgaccaacaacgccaagatcatcattgtgcatctgcacacccctgtggaaatcgtgtgcacccggcctaacaacaacaccagaaagagcgtgcggatcggccctggccagaccttttatgccaccggcgacatcatcggcaaccccagacaggcccactgtaacatcagcaaagagcggtggaacgacaccctgcagaaagtgggcaaagagctgcagaagcacttccccaacaagaccatcaagtacaaccagagcgctggcggcgacatggaaatcaccacacacagcttcaattgtggcggcgagttcttctactgcaatacctccaacctgttcaacagcacctacaacgacacctacatcagcaccaactccaccaatagcaccagctacattaccctgcagtgccggatcaagcagatcatcaatatgtggcaaggcgtcggccggtgtatgtacgcccctcctatcgccggcaacatcacatgcaagtccaacatcaccggcctgctgctcacaagagatggcggcatcaacaaggacagcaacgaaaccgaaaccttccggcctgccggcggagacatgagagacaattggagaagaagcgagctgtacaagtacaaggtggtcaagatcgagcccctgggcgtcgcaccaacacggtgcaagagaagagtcgtgggccgtcgtagaaggcggagagccgttggaattggcgccgtgttcctgggctttctgggagccgctggatctacaatgggcgctgccagcatgaccctgacagtgcaggctagaaatctgctgagcggcatcgtgcagcagcagagcaatctgctcagagcccctgaggctcagcagcacctcctgaaactgacagtgtggggcatcaagcagctgcaggcaagagtgctggcagtggaaagatacctgcgggaccagcagctcctcggaatctggggatgtagcggcaagctgatctgctgcaccaacgtgccctggaactccagctggtccaacagaaacctgagcgagatctgggataacatgacctggctgcagtgggacaaagaaatcagcaactacacccagatcatctacggactgctggaagagagccagaaccagcaagagaaaaacgagcaggacctgctggccctggactgataaggatcc

SEQ ID NO: 135 - protein, 655 aa, Artificial Sequence
  Description of Artificial Sequence: Synthetic polypeptide
MPMGSLQPLATLYLLGMLVASVLAAENLWVTVYYGVPVWEDADTPLFCASDAKAYSTESHNVWATHACVPTDPSPQEISLDNVTENFNMWKNNMVEQMHEDIISLWDESLKPCVKLTPLCVTLNCTNVNNSSATNNSMVDDREGLKNCSFNITTELRDKKKQEHALFYRLDIVPINGNSNSNSSVGDYRLINCNVSTCKQACPKMSFDPIPIHYCAPAGFAILKCRDKKFNGTGSCKNVSTVQCTHGIKPVISTQLLLNGSVAEEEIMIRSENFTNNAKNIIVQFNKTIDIMCTRPNNNTRKSISLGPGQAIYATGDIIGNIRQAHCNISGADWGNMIRNVSEKLKEIFNKTTITFKASAGGDLEITTHSFNCRGEFFYCDTSDLFNSSRFNNSSNDTNDTITLPCKIKQIVRMWQRVGQCMYAPPIAGNITCRSNITGLLLTRDGGGNNTNETETFRPAGGDMRDNWRSELYKYKVVKIEPLGVAPTRCKRRVVGRRRRRRAVGIGAVFLGFLGAAGSTMGAASMTLTVQARNLLSGIVQQQSNLLRAPEAQQHLLKLTVWGIKQLQARVLAVERYLRDQQLLGIWGCSGKLICCTNVPWNSSWSNRNLSEIWDNMTWLQWDKEISNYTQIIYGLLEESQNQQEKNEQDLLALD

SEQ ID NO: 136 - protein, 655 aa, Artificial Sequence
  Description of Artificial Sequence: Synthetic polypeptide
MPMGSLQPLATLYLLGMLVASVLASNNLWVTVYYGVPVWEDADTPLFCASDAKAYSTESHNVWATHACVPTDPSPQEISLDNVTENFNMWKNNMVEQMHEDIISLWDESLKPCVKLTPLCVTLNCTNVNNSSATNNSMVDDREGLKNCSFNITTELRDKKKQEHALFYRLDIVPINGNSNSNSSVGDYRLINCNVSTIKQACPKMSFDPIPIHYCAPAGFAILKCRDKKFNGTGSCKNVSTVQCTHGIKPVISTQLLLNGSVAEEEIMIRSENFTNNAKNIIVQFNKTIDIMCTRPNNNTRKSISLGPGQAIYATGDIIGNIRQAHCNISGADWGNMIRNVSEKLKEIFNKTTITFKASAGGDLEITTHSFNCRGEFFYCDTSDLFNSSRFNNSSNDTNDTITLPCKIKQIVRMWQRVGQAMYAPPIAGNITCRSNITGLLLTRDGGGNNTNETETFRPAGGDMRDNWRSELYKYKVVKINPLGVAPTRCRRRVVGRRRRRRAIGMGAVLLGFLGTAGSTMGAASITLTVQVRQLLSGIVQQQSNLLRAPEAQQHLLQLTVWGIKQLQARILAVERYLKDQQLLGIWGCSGKLICCTNVPWNASWSNRSYNDIWENLTWVEWEREISNYTQQIYSLLEESQNQQEKNEQDLLALD

SEQ ID NO: 137 - protein, 655 aa, Artificial Sequence
  Description of Artificial Sequence: Synthetic polypeptide
MPMGSLQPLATLYLLGMLVASVLASNNLWVTVYYGVPVWEDADTPLFCASDAKAYSTESHNVWATHACVPTDPSPQEISLDNVTENFNMWKNNMVEQMHEDIISLWDESLKPCVKLTPLCVTLNCTNVNNSSATNNSMVDDREGLKNCSFNITTELRDKKKQEHALFYRLDIVPINGNSNSNSSVGDYRLINCNVSTCKQACPKMSFDPIPIHYCAPAGFAILKCRDKKFNGTGSCKNVSTVQCTHGIKPVISTQLLLNGSVAEEEIMIRSENFTNNAKNIIVQFNKTIDIMCTRPNNNTRKSISLGPGQAIYATGDIIGNIRQAHCNISGADWGNMIRNVSEKLKEIFNKTTITFKASAGGDLEITTHSFNCRGEFFYCDTSDLFNSSRFNNSSNDTNDTITLPCKIKQIVRMWQRVGQCMYAPPIAGNITCRSNITGLLLTRDGGGNNTNETETFRPAGGDMRDNWRSELYKYKVVKINPLGVAPTRCRRRVVGRRRRRRAIGMGAVLLGFLGTAGSTMGAASITLTVQVRQLLSGIVQQQSNLLRAPEAQQHLLQLTVWGIKQLQARILAVERYLKDQQLLGIWGCSGKLICCTNVPWNASWSNRSYNDIWENLTWVEWEREISNYTQQIYSLLEESQNQQEKNEQDLLALD

SEQ ID NO: 138 - protein, 642 aa, Artificial Sequence
  Description of Artificial Sequence: Synthetic polypeptide
MPMGSLQPLATLYLLGMLVASVLASNNLWVTVYYGVPVWEDADTPLFCASDAKAYSTESHNVWATHACVPTDPSPQEISLDNVTENFNMWKNNMVEQMHEDIISLWDESLKPCVKLTPLCVTLNCTNVNNSSATNNSMVDDREGLKNCSFNITTELRDKKKQEHALFYRLDIVPINGNSNSNSSVGDYRLINCNVSTCKQACPKMSFDPIPIHYCAPAGFAILKCRDKKFNGTGSCKNVSTVQCTHGIKPVISTQLLLNGSVAEEEIMIRSENFTNNAKNIIVQFNKTIDIMCTRPNNNTRKSISLGPGQAIYATGDIIGNIRQAHCNISGADWGNMIRNVSEKLKEIFNKTTITFKASAGGDLEITTHSFNCRGEFFYCDTSDLFNSSRFNNSSNDTNDTITLPCKIKQIVRMWQRVGQCMYAPPIAGNITCRSNITGLLLTRDGGGNNTNETETFRPAGGDMRDNWRSELYKYKVVKINPLGVAPTRCRRRVVGRRRRRRAIGMGAVLLGFLGTAGSTMGAASITLTVQVRQLLSGNPDWLPDMTVWGIKQLQARILAVERYLKDQQLLGIWGCSGKLICCTNVPWNASWSNRSYNDIWENLTWVEWEREISNYTQQIYSLLEESQNQQEKNEQDLLALD

SEQ ID NO: 139 - protein, 655 aa, Artificial Sequence
  Description of Artificial Sequence: Synthetic polypeptide
MPMGSLQPLATLYLLGMLVASVLASNNLWVTVYYGVPVWEDACTPLFCASDAKAYSTKSRNVWATCCCVPTDPSPQEISLDNVTENFNMWKNNMVEQMHEDIISLWDESLKPCVKLTPLCVTLNCTNVNNSSATNNSMVDDREGLKNCSFNITTELRDKKKQEHALFYRLDIVPINGNSNSNSSVGDYRLINCNVSTIKQACPKMSFDPIPIHYCAPAGFAILKCRDKKFNGTGSCKNVSTVQCTHGIKPVISTQLLLNGSVAEEEIMIRSENFTNNAKNIIVQFNKTIDIMCTRPNNNTRKSISLGPGQAWYATGDIIGNIRQAHCNISGADWGNMIRNVSEKLKEIFNKTTITFKASAGGDLEITTHSFNCRGEFFYCDTSDLFNSSRFNNSSNDTNDTITLPCKIKQIVRMWQRVGQAMYAPPIAGNITCRSNITGLLLTRDGGGNNTNETETFRPAGGDMRDNWRSELYKYKVVKINPLGVAPTRCRRRVVGRRRRRRAIGMGAVLLGFLGTAGSTMGAASMTLTVQVRQLLSGIVQQQSNCLRAPECQQCLLQLTVWGIKQLQARILAVERYLKDQQLLGIWGCSGKLICCTNVPWNASWSNRSYNDIWENLTWVEWEREISNYTQQIYSLLEESQNQQEKNEQDLLALD

SEQ ID NO: 140 - protein, 655 aa, Artificial Sequence
  Description of Artificial Sequence: Synthetic polypeptide
MPMGSLQPLATLYLLGMLVASVLASNNLWVTVYYGVPVWEDAETPLFCASDAKAYSTEKHNVWATHACVPTDPSPQEISLDNVTENFNMWKNNMVEQMHTDIISLWDESLKPCVKLTPLCVTLNCTNVNNSSATNNSMVDDREGLKNCSFNITTELRDKKKQVHALFYRLDIVPINGNSNSNSSVGDYRLINCNVSTIKQACPKMSFDPIPIHYCAPAGFAILKCRDKKFNGTGSCKNVSTVQCTHGIKPVISTQLLLNGSVAEEEIMIRSENFTNNAKNIIVQFNKTIDIMCTRPNNNTRKSIRLGPGQAIYATGDIIGNIRQAHCNISGADWGNMIRNVSEKLKEIFNKTTITFKASAGGDLEITTHSFNCRGEFFYCDTSDLFNSSRFNNSSNDTNDTITLPCKIKQIVRMWQRVGQAMYAPPIAGNITCRSNITGLLLTRDGGGNNTNETETFRPAGGDMRDNWRSELYKYKVVKINPLGVAPTRCRRRVVGRRRRRRAIGMGAVLLGFLGTAGSTMGAASITLTVQVRNLLSGIVQQQSNLLRAPEAQQHLLQLTVWGIKQLQARILAVERYLRDQQLLGIWGCSGKLICCTNVPWNASWSNRSYNDIWENLTWVEWEREISNYTQQIYSLLEESQNQQEKNEQDLLALD

SEQ ID NO: 141 - protein, 666 aa, Artificial Sequence
  Description of Artificial Sequence: Synthetic polypeptide
MDAMKRGLCCVLLLCGAVFVSPSQEIHARFRRGARAENLWVTVYYGVPVWEDADTPLFCASDAKAYSTESHNVWATHACVPTDPSPQEISLDNVTENFNMWKNNMVEQMHEDIISLWDESLKPCVKLTPLCVTLNCTNVNNSSATNNSMVDDREGLKNCSFNITTELRDKKKQEHALFYRLDIVPINGNSNSNSSVGDYRLINCNVSTCKQACPKMSFDPIPIHYCAPAGFAILKCRDKKFNGTGSCKNVSTVQCTHGIKPVISTQLLLNGSVAEEEIMIRSENFTNNAKNIIVQFNKTIDIMCTRPNNNTRKSISLGPGQAIYATGDIIGNIRQAHCNISGADWGNMIRNVSEKLKEIFNKTTITFKASAGGDLEITTHSFNCRGEFFYCDTSDLFNSSRFNNSSNDTNDTITLPCKIKQIVRMWQRVGQCMYAPPIAGNITCRSNITGLLLTRDGGGNNTNETETFRPAGGDMRDNWRSELYKYKVVKIEPLGVAPTRCKRRVVGRRRRRRAVGIGAVFLGFLGAAGSTMGAASMTLTVQARNLLSGIVQQQSNLLRAPEAQQHLLKLTVWGIKQLQARVLAVERYLRDQQLLGIWGCSGKLICCTNVPWNSSWSNRNLSEIWDNMTWLQWDKEISNYTQIIYGLLEESQNQQEKNEQDLLALD

SEQ ID NO: 142 - protein, 666 aa, Artificial Sequence
  Description of Artificial Sequence: Synthetic polypeptide
MDAMKRGLCCVLLLCGAVFVSPSQEIHARFRRGARSNNLWVTVYYGVPVWEDADTPLFCASDAKAYSTESHNVWATHACVPTDPSPQEISLDNVTENFNMWKNNMVEQMHEDIISLWDESLKPCVKLTPLCVTLNCTNVNNSSATNNSMVDDREGLKNCSFNITTELRDKKKQEHALFYRLDIVPINGNSNSNSSVGDYRLINCNVSTIKQACPKMSFDPIPIHYCAPAGFAILKCRDKKFNGTGSCKNVSTVQCTHGIKPVISTQLLLNGSVAEEEIMIRSENFTNNAKNIIVQFNKTIDIMCTRPNNNTRKSISLGPGQAIYATGDIIGNIRQAHCNISGADWGNMIRNVSEKLKEIFNKTTITFKASAGGDLEITTHSFNCRGEFFYCDTSDLFNSSRFNNSSNDTNDTITLPCKIKQIVRMWQRVGQAMYAPPIAGNITCRSNITGLLLTRDGGGNNTNETETFRPAGGDMRDNWRSELYKYKVVKINPLGVAPTRCRRRVVGRRRRRRAIGMGAVLLGFLGTAGSTMGAASITLTVQVRQLLSGIVQQQSNLLRAPEAQQHLLQLTVWGIKQLQARILAVERYLKDQQLLGIWGCSGKLICCTNVPWNASWSNRSYNDIWENLTWVEWEREISNYTQQIYSLLEESQNQQEKNEQDLLALD

SEQ ID NO: 143 - protein, 666 aa, Artificial Sequence
  Description of Artificial Sequence: Synthetic polypeptide
MDAMKRGLCCVLLLCGAVFVSPSQEIHARFRRGARSNNLWVTVYYGVPVWEDADTPLFCASDAKAYSTESHNVWATHACVPTDPSPQEISLDNVTENFNMWKNNMVEQMHEDIISLWDESLKPCVKLTPLCVTLNCTNVNNSSATNNSMVDDREGLKNCSFNITTELRDKKKQEHALFYRLDIVPINGNSNSNSSVGDYRLINCNVSTCKQACPKMSFDPIPIHYCAPAGFAILKCRDKKFNGTGSCKNVSTVQCTHGIKPVISTQLLLNGSVAEEEIMIRSENFTNNAKNIIVQFNKTIDIMCTRPNNNTRKSISLGPGQAIYATGDIIGNIRQAHCNISGADWGNMIRNVSEKLKEIFNKTTITFKASAGGDLEITTHSFNCRGEFFYCDTSDLFNSSRFNNSSNDTNDTITLPCKIKQIVRMWQRVGQCMYAPPIAGNITCRSNITGLLLTRDGGGNNTNETETFRPAGGDMRDNWRSELYKYKVVKINPLGVAPTRCRRRVVGRRRRRRAIGMGAVLLGFLGTAGSTMGAASITLTVQVRQLLSGIVQQQSNLLRAPEAQQHLLQLTVWGIKQLQARILAVERYLKDQQLLGIWGCSGKLICCTNVPWNASWSNRSYNDIWENLTWVEWEREISNYTQQIYSLLEESQNQQEKNEQDLLALD

SEQ ID NO: 144 - protein, 653 aa, Artificial Sequence
  Description of Artificial Sequence: Synthetic polypeptide
MDAMKRGLCCVLLLCGAVFVSPSQEIHARFRRGARSNNLWVTVYYGVPVWEDADTPLFCASDAKAYSTESHNVWATHACVPTDPSPQEISLDNVTENFNMWKNNMVEQMHEDIISLWDESLKPCVKLTPLCVTLNCTNVNNSSATNNSMVDDREGLKNCSFNITTELRDKKKQEHALFYRLDIVPINGNSNSNSSVGDYRLINCNVSTCKQACPKMSFDPIPIHYCAPAGFAILKCRDKKFNGTGSCKNVSTVQCTHGIKPVISTQLLLNGSVAEEEIMIRSENFTNNAKNIIVQFNKTIDIMCTRPNNNTRKSISLGPGQAIYATGDIIGNIRQAHCNISGADWGNMIRNVSEKLKEIFNKTTITFKASAGGDLEITTHSFNCRGEFFYCDTSDLFNSSRFNNSSNDTNDTITLPCKIKQIVRMWQRVGQCMYAPPIAGNITCRSNITGLLLTRDGGGNNTNETETFRPAGGDMRDNWRSELYKYKVVKINPLGVAPTRCRRRVVGRRRRRRAIGMGAVLLGFLGTAGSTMGAASITLTVQVRQLLSGNPDWLPDMTVWGIKQLQARILAVERYLKDQQLLGIWGCSGKLICCTNVPWNASWSNRSYNDIWENLTWVEWEREISNYTQQIYSLLEESQNQQEKNEQDLLALD

SEQ ID NO: 145 - protein, 666 aa, Artificial Sequence
  Description of Artificial Sequence: Synthetic polypeptide
MDAMKRGLCCVLLLCGAVFVSPSQEIHARFRRGARSNNLWVTVYYGVPVWEDACTPLFCASDAKAYSTKSRNVWATCCCVPTDPSPQEISLDNVTENFNMWKNNMVEQMHEDIISLWDESLKPCVKLTPLCVTLNCTNVNNSSATNNSMVDDREGLKNCSFNITTELRDKKKQEHALFYRLDIVPINGNSNSNSSVGDYRLINCNVSTIKQACPKMSFDPIPIHYCAPAGFAILKCRDKKFNGTGSCKNVSTVQCTHGIKPVISTQLLLNGSVAEEEIMIRSENFTNNAKNIIVQFNKTIDIMCTRPNNNTRKSISLGPGQAWYATGDIIGNIRQAHCNISGADWGNMIRNVSEKLKEIFNKTTITFKASAGGDLEITTHSFNCRGEFFYCDTSDLFNSSRFNNSSNDTNDTITLPCKIKQIVRMWQRVGQAMYAPPIAGNITCRSNITGLLLTRDGGGNNTNETETFRPAGGDMRDNWRSELYKYKVVKINPLGVAPTRCRRRVVGRRRRRRAIGMGAVLLGFLGTAGSTMGAASMTLTVQVRQLLSGIVQQQSNCLRAPECQQCLLQLTVWGIKQLQARILAVERYLKDQQLLGIWGCSGKLICCTNVPWNASWSNRSYNDIWENLTWVEWEREISNYTQQIYSLLEESQNQQEKNEQDLLALD

SEQ ID NO: 146 - protein, 666 aa, Artificial Sequence
  Description of Artificial Sequence: Synthetic polypeptide
MDAMKRGLCCVLLLCGAVFVSPSQEIHARFRRGARSNNLWVTVYYGVPVWEDAETPLFCASDAKAYSTEKHNVWATHACVPTDPSPQEISLDNVTENFNMWKNNMVEQMHTDIISLWDESLKPCVKLTPLCVTLNCTNVNNSSATNNSMVDDREGLKNCSFNITTELRDKKKQVHALFYRLDIVPINGNSNSNSSVGDYRLINCNVSTIKQACPKMSFDPIPIHYCAPAGFAILKCRDKKFNGTGSCKNVSTVQCTHGIKPVISTQLLLNGSVAEEEIMIRSENFTNNAKNIIVQFNKTIDIMCTRPNNNTRKSIRLGPGQAIYATGDIIGNIRQAHCNISGADWGNMIRNVSEKLKEIFNKTTITFKASAGGDLEITTHSFNCRGEFFYCDTSDLFNSSRFNNSSNDTNDTITLPCKIKQIVRMWQRVGQAMYAPPIAGNITCRSNITGLLLTRDGGGNNTNETETFRPAGGDMRDNWRSELYKYKVVKINPLGVAPTRCRRRVVGRRRRRRAIGMGAVLLGFLGTAGSTMGAASITLTVQVRNLLSGIVQQQSNLLRAPEAQQHLLQLTVWGIKQLQARILAVERYLRDQQLLGIWGCSGKLICCTNVPWNASWSNRSYNDIWENLTWVEWEREISNYTQQIYSLLEESQNQQEKNEQDLLALD

SEQ ID NO: 147 - protein, 644 aa, Artificial Sequence
  Description of Artificial Sequence: Synthetic polypeptide
MGSLQPLATLYLLGMLVASVLAAENLWVTVYYGVPVWKEAKTTLFCASDAKAYDPEVHNVWATHACVPTDPNPQEMFLENVTENFNMWKNDMVEQMHQDIISLWSQSLKPCVKLTPLCVTLNCSDVINSTGTMKNCSFSVTTELRDRKQKKHALFYRLDIVPLDENDNSSKDYRLINCNTSTCTQACPKVTFDPIPIHYCAPAGYAILKCNNKTFNGTGPCNNVSTVQCTHGIKPVVSTQLLLNGSLAEEEVIIRSENLTDNVKTIIVQLKEPVGINCTRPNNNIRQSIRIGPGQTFFATGDIIGDIREAHCNISSTKWRETLQQVGGKLAKYFNNKTIKFTQHSGGDLEITTHSFNCRGEFFYCNTSQLFNSTYNETGSINGTGNSTIKLPCRIKQIINMWQGVGQCMYAPPIAGNIICRSKITGLLLTRDGGINKSEEIFRPGGGNMKDNWRDNWRSELYKYKVVKIEPLGVAPTRCKRRVVGRRRRRRAVGIGAVFLGFLGAAGSTMGAASMTLTVQARNLLSGIVQQQSNLLRAPEAQQHLLKLTVWGIKQLQARVLAVERYLRDQQLLGIWGCSGKLICCTNVPWNSSWSNRNLSEIWDNMTWLQWDKEISNYTQIIYGLLEESQNQQEKNEQDLLALD

SEQ ID NO: 148 - protein, 639 aa, Artificial Sequence
  Description of Artificial Sequence: Synthetic polypeptide
MGSLQPLATLYLLGMLVASVLANLWVTVYYGVPVWKEAKTTLFCASDAKAYDPEVHNVWATHACVPTDPNPQEMFLENVTENFNMWKNDMVEQMHQDIISLWSQSLKPCVKLTPLCVTLNCSDVINSTGTMKNCSFSVTTELRDRKQKKHALFYRLDIVPLDENDNSSKDYRLINCNTSTCTQACPKVTFDPIPIHYCAPAGYAILKCNNKTFNGTGPCNNVSTVQCTHGIKPVVSTQLLLNGSLAEEEVIIRSENLTDNVKTIIVQLKEPVGINCTRPNNNIRQSIRIGPGQTFFATGDIIGDIREAHCNISSTKWRETLQQVGGKLAKYFNNKTIKFTQHSGGDLEITTHSFNCRGEFFYCNTSQLFNSTYNETGSINGTGNSTIKLPCRIKQIINMWQGVGQCMYAPPIAGNIICRSKITGLLLTRDGGINKSEEIFRPGGGNMKDNWRSELYKYKVVEIKPLGVAPTKCKRRVVERRRRRRAVVGLGAVFLGFLGAAGSTMGAASITLTVQARQLLSGIVQQQNNLLRAPEAQQHMLQLTVWGIKQLQARVLAIERYLKDQQLLGIWGCSGKLICCTAVPWNSSWSNKSQEDIWDNMTWMQWDREISNYTNTIYRLLEDSQTQQEKNEKDLLALD

SEQ ID NO: 149 - protein, 639 aa, Artificial Sequence
  Description of Artificial Sequence: Synthetic polypeptide
MGSLQPLATLYLLGMLVASVLANLWVTVYYGVPVWKEACTTLFCASDAKAYDPKVRNVWATHCCVPTDPNPQEMFLENVTENFNMWKNDMVEQMHQDIISLWSQSLKPCVKLTPLCVTLNCSDVINSTGTMKNCSFSVTTELRDRKQKKHALFYRLDIVPLDENDNSSKDYRLINCNTSTCTQACPKVTFDPIPIHYCAPAGYAILKCNNKTFNGTGPCNNVSTVQCTHGIKPVVSTQLLLNGSLAEEEVIIRSENLTDNVKTIIVQLKEPVGINCTRPNNNIRQSIRIGPGQTWFATGDIIGDIREAHCNISSTKWRETLQQVGGKLAKYFNNKTIKFTQHSGGDLEITTHSFNCRGEFFYCNTSQLFNSTYNETGSINGTGNSTIKLPCRIKQIINMWQGVGQCMYAPPIAGNIICRSKITGLLLTRDGGINKSEEIFRPGGGNMKDNWRSELYKYKVVEIKPLGVAPTKCKRRVVERRRRRRAVVGLGAVFLGFLGAAGSTMGAASMTLTVQARQLLSGIVQQQNNCLRAPECQQCMLQLTVWGIKQLQARVLAIERYLKDQQLLGIWGCSGKLICCTAVPWNSSWSNKSQEDIWDNMTWMQWDREISNYTNTIYRLLEDSQTQQEKNEKDLLALD

SEQ ID NO: 150 - protein, 626 aa, Artificial Sequence
  Description of Artificial Sequence: Synthetic polypeptide
MGSLQPLATLYLLGMLVASVLANLWVTVYYGVPVWKEAKTTLFCASDAKAYDPEVHNVWATHACVPTDPNPQEMFLENVTENFNMWKNDMVEQMHQDIISLWSQSLKPCVKLTPLCVTLNCSDVINSTGTMKNCSFSVTTELRDRKQKKHALFYRLDIVPLDENDNSSKDYRLINCNTSTCTQACPKVTFDPIPIHYCAPAGYAILKCNNKTFNGTGPCNNVSTVQCTHGIKPVVSTQLLLNGSLAEEEVIIRSENLTDNVKTIIVQLKEPVGINCTRPNNNIRQSIRIGPGQTFFATGDIIGDIREAHCNISSTKWRETLQQVGGKLAKYFNNKTIKFTQHSGGDLEITTHSFNCRGEFFYCNTSQLFNSTYNETGSINGTGNSTIKLPCRIKQIINMWQGVGQCMYAPPIAGNIICRSKITGLLLTRDGGINKSEEIFRPGGGNMKDNWRSELYKYKVVEIKPLGVAPTKCKRRVVERRRRRRAVVGLGAVFLGFLGAAGSTMGAASITLTVQARQLLSGNPDWLPDMTVWGIKQLQARVLAIERYLKDQQLLGIWGCSGKLICCTAVPWNSSWSNKSQEDIWDNMTWMQWDREISNYTNTIYRLLEDSQTQQEKNEKDLLALD

SEQ ID NO: 151 - protein, 639 aa, Artificial Sequence
  Description of Artificial Sequence: Synthetic polypeptide
MGSLQPLATLYLLGMLVASVLANLWVTVYYGVPVWKDAETTLFCASDAKAYDPEKHNVWATHACVPTDPNPQEMFLENVTENFNMWKNDMVEQMHTDIISLWSQSLKPCVKLTPLCVTLNCSDVINSTGTMKNCSFSVTTELRDRKQKVHALFYRLDIVPLDENDNSSKDYRLINCNTSTCTQACPKVTFDPIPIHYCAPAGYAILKCNNKTFNGTGPCNNVSTVQCTHGIKPVVSTQLLLNGSLAEEEVIIRSENLTDNVKTIIVQLKEPVGINCTRPNNNIRQSIRIGPGQTFFATGDIIGDIREAHCNISSTKWRETLQQVGGKLAKYFNNKTIKFTQHSGGDLEITTHSFNCRGEFFYCNTSQLFNSTYNETGSINGTGNSTIKLPCRIKQIINMWQRVGQCMYAPPIAGNIICRSKITGLLLTRDGGINKSEEIFRPGGGNMKDNWRSELYKYKVVEIKPLGVAPTRCKRRVVERRRRRRAVVGLGAVFLGFLGAAGSTMGAASITLTVQARNLLSGIVQQQSNLLRAPEAQQHMLQLTVWGIKQLQARVLAIERYLRDQQLLGIWGCSGKLICCTAVPWNSSWSNKSQEDIWDNMTWMQWDREISNYTNTIYRLLEDSQTQQEKNEKDLLALD

SEQ ID NO: 152 - protein, 657 aa, Artificial Sequence
  Description of Artificial Sequence: Synthetic polypeptide
MDAMKRGLCCVLLLCGAVFVSPSQEIHARFRRGARAENLWVTVYYGVPVWKEAKTTLFCASDAKAYDPEVHNVWATHACVPTDPNPQEMFLENVTENFNMWKNDMVEQMHQDIISLWSQSLKPCVKLTPLCVTLNCSDVINSTGTMKNCSFSVTTELRDRKQKKHALFYRLDIVPLDENDNSSKDYRLINCNTSTCTQACPKVTFDPIPIHYCAPAGYAILKCNNKTFNGTGPCNNVSTVQCTHGIKPVVSTQLLLNGSLAEEEVIIRSENLTDNVKTIIVQLKEPVGINCTRPNNNIRQSIRIGPGQTFFATGDIIGDIREAHCNISSTKWRETLQQVGGKLAKYFNNKTIKFTQHSGGDLEITTHSFNCRGEFFYCNTSQLFNSTYNETGSINGTGNSTIKLPCRIKQIINMWQGVGQCMYAPPIAGNIICRSKITGLLLTRDGGINKSEEIFRPGGGNMKDNWRDNWRSELYKYKVVKIEPLGVAPTRCKRRVVGRRRRRRAVGIGAVFLGFLGAAGSTMGAASMTLTVQARNLLSGIVQQQSNLLRAPEAQQHLLKLTVWGIKQLQARVLAVERYLRDQQLLGIWGCSGKLICCTNVPWNSSWSNRNLSEIWDNMTWLQWDKEISNYTQIIYGLLEESQNQQEKNEQDLLALD

SEQ ID NO: 153 - protein, 652 aa, Artificial Sequence
  Description of Artificial Sequence: Synthetic polypeptide
MDAMKRGLCCVLLLCGAVFVSPSQEIHARFRRGARNLWVTVYYGVPVWKEAKTTLFCASDAKAYDPEVHNVWATHACVPTDPNPQEMFLENVTENFNMWKNDMVEQMHQDIISLWSQSLKPCVKLTPLCVTLNCSDVINSTGTMKNCSFSVTTELRDRKQKKHALFYRLDIVPLDENDNSSKDYRLINCNTSTCTQACPKVTFDPIPIHYCAPAGYAILKCNNKTFNGTGPCNNVSTVQCTHGIKPVVSTQLLLNGSLAEEEVIIRSENLTDNVKTIIVQLKEPVGINCTRPNNNIRQSIRIGPGQTFFATGDIIGDIREAHCNISSTKWRETLQQVGGKLAKYFNNKTIKFTQHSGGDLEITTHSFNCRGEFFYCNTSQLFNSTYNETGSINGTGNSTIKLPCRIKQIINMWQGVGQCMYAPPIAGNIICRSKITGLLLTRDGGINKSEEIFRPGGGNMKDNWRSELYKYKVVEIKPLGVAPTKCKRRVVERRRRRRAVVGLGAVFLGFLGAAGSTMGAASITLTVQARQLLSGIVQQQNNLLRAPEAQQHMLQLTVWGIKQLQARVLAIERYLKDQQLLGIWGCSGKLICCTAVPWNSSWSNKSQEDIWDNMTWMQWDREISNYTNTIYRLLEDSQTQQEKNEKDLLALD

SEQ ID NO: 154 - protein, 652 aa, Artificial Sequence
  Description of Artificial Sequence: Synthetic polypeptide
MDAMKRGLCCVLLLCGAVFVSPSQEIHARFRRGARNLWVTVYYGVPVWKEACTTLFCASDAKAYDPKVRNVWATHCCVPTDPNPQEMFLENVTENFNMWKNDMVEQMHQDIISLWSQSLKPCVKLTPLCVTLNCSDVINSTGTMKNCSFSVTTELRDRKQKKHALFYRLDIVPLDENDNSSKDYRLINCNTSTCTQACPKVTFDPIPIHYCAPAGYAILKCNNKTFNGTGPCNNVSTVQCTHGIKPVVSTQLLLNGSLAEEEVIIRSENLTDNVKTIIVQLKEPVGINCTRPNNNIRQSIRIGPGQTWFATGDIIGDIREAHCNISSTKWRETLQQVGGKLAKYFNNKTIKFTQHSGGDLEITTHSFNCRGEFFYCNTSQLFNSTYNETGSINGTGNSTIKLPCRIKQIINMWQGVGQCMYAPPIAGNIICRSKITGLLLTRDGGINKSEEIFRPGGGNMKDNWRSELYKYKVVEIKPLGVAPTKCKRRVVERRRRRRAVVGLGAVFLGFLGAAGSTMGAASMTLTVQARQLLSGIVQQQNNCLRAPECQQCMLQLTVWGIKQLQARVLAIERYLKDQQLLGIWGCSGKLICCTAVPWNSSWSNKSQEDIWDNMTWMQWDREISNYTNTIYRLLEDSQTQQEKNEKDLLALD

SEQ ID NO: 155 - protein, 639 aa, Artificial Sequence
  Description of Artificial Sequence: Synthetic polypeptide
MDAMKRGLCCVLLLCGAVFVSPSQEIHARFRRGARNLWVTVYYGVPVWKEAKTTLFCASDAKAYDPEVHNVWATHACVPTDPNPQEMFLENVTENFNMWKNDMVEQMHQDIISLWSQSLKPCVKLTPLCVTLNCSDVINSTGTMKNCSFSVTTELRDRKQKKHALFYRLDIVPLDENDNSSKDYRLINCNTSTCTQACPKVTFDPIPIHYCAPAGYAILKCNNKTFNGTGPCNNVSTVQCTHGIKPVVSTQLLLNGSLAEEEVIIRSENLTDNVKTIIVQLKEPVGINCTRPNNNIRQSIRIGPGQTFFATGDIIGDIREAHCNISSTKWRETLQQVGGKLAKYFNNKTIKFTQHSGGDLEITTHSFNCRGEFFYCNTSQLFNSTYNETGSINGTGNSTIKLPCRIKQIINMWQGVGQCMYAPPIAGNIICRSKITGLLLTRDGGINKSEEIFRPGGGNMKDNWRSELYKYKVVEIKPLGVAPTKCKRRVVERRRRRRAVVGLGAVFLGFLGAAGSTMGAASITLTVQARQLLSGNPDWLPDMTVWGIKQLQARVLAIERYLKDQQLLGIWGCSGKLICCTAVPWNSSWSNKSQEDIWDNMTWMQWDREISNYTNTIYRLLEDSQTQQEKNEKDLLALD

SEQ ID NO: 156 - protein, 652 aa, Artificial Sequence
  Description of Artificial Sequence: Synthetic polypeptide
MDAMKRGLCCVLLLCGAVFVSPSQEIHARFRRGARNLWVTVYYGVPVWKDAETTLFCASDAKAYDPEKHNVWATHACVPTDPNPQEMFLENVTENFNMWKNDMVEQMHTDIISLWSQSLKPCVKLTPLCVTLNCSDVINSTGTMKNCSFSVTTELRDRKQKVHALFYRLDIVPLDENDNSSKDYRLINCNTSTCTQACPKVTFDPIPIHYCAPAGYAILKCNNKTFNGTGPCNNVSTVQCTHGIKPVVSTQLLLNGSLAEEEVIIRSENLTDNVKTIIVQLKEPVGINCTRPNNNIRQSIRIGPGQTFFATGDIIGDIREAHCNISSTKWRETLQQVGGKLAKYFNNKTIKFTQHSGGDLEITTHSFNCRGEFFYCNTSQLFNSTYNETGSINGTGNSTIKLPCRIKQIINMWQRVGQCMYAPPIAGNIICRSKITGLLLTRDGGINKSEEIFRPGGGNMKDNWRSELYKYKVVEIKPLGVAPTRCKRRVVERRRRRRAVVGLGAVFLGFLGAAGSTMGAASITLTVQARNLLSGIVQQQSNLLRAPEAQQHMLQLTVWGIKQLQARVLAIERYLRDQQLLGIWGCSGKLICCTAVPWNSSWSNKSQEDIWDNMTWMQWDREISNYTNTIYRLLEDSQTQQEKNEKDLLALD

SEQ ID NO: 157 - protein, 649 aa, Artificial Sequence
  Description of Artificial Sequence: Synthetic polypeptide
MPMGSLQPLATLYLLGMLVASVLAKGKLWVTVYYGVPVWKEAKTTLFCASDARAYEKEVHNVWATHACVPTDPSPQELFLKNVTENFNMWKNDMVDQMHEDIISLWDQSLKPCVKLTPLCVTLICSNATVKNRTVEEMKNCSFNTTTEIRDKEKKEYALFYKPDVVPLDETNNTSEYRLINCNTSACTQACPKVTFEPIPIHYCAPAGYAILKCNNETFNGTGPCSNVSTVQCTHGIRPVVSTQLLLNGSLAEKEIVIRSENLTNNAKIIIVHLNTPVEIVCTRPNNNTRKSVRIGPGQTFYATGDIIGDIRQAHCNISEKQWNDTLQKVGKELKKHFPNKTIKYAQSAGGDMEITTHSFNCGGEFFYCNTAKLFNGTYNGTDISTNSSADSNSTITLQCRIKQIINMWQGVGRCMYAPPIAGNITCKSHITGLLLTRDGGTNSSGKEEIFRPAGGDMRDNWRSELYKYKVVEIQPLGIAPTGCKRRVVERRRRRRAAGLGALFLGFLGAAGSTMGAASITLTVQARQLLSGIVQQQSNLLRAPEAQQHMLQLTVWGIKQLQARVLALERYLKDQQLLGMWGCSGKLICCTNVPWNTSWSNKSETDIWDNMTWMQWEREISNYTETIYKLLEDSQNQQERNEQDLLALD

SEQ ID NO: 158 - protein, 660 aa, Artificial Sequence
  Description of Artificial Sequence: Synthetic polypeptide
MDAMKRGLCCVLLLCGAVFVSPSQEIHARFRRGARKGKLWVTVYYGVPVWKEAKTTLFCASDARAYEKEVHNVWATHACVPTDPSPQELFLKNVTENFNMWKNDMVDQMHEDIISLWDQSLKPCVKLTPLCVTLICSNATVKNRTVEEMKNCSFNTTTEIRDKEKKEYALFYKPDVVPLDETNNTSEYRLINCNTSACTQACPKVTFEPIPIHYCAPAGYAILKCNNETFNGTGPCSNVSTVQCTHGIRPVVSTQLLLNGSLAEKEIVIRSENLTNNAKIIIVHLNTPVEIVCTRPNNNTRKSVRIGPGQTFYATGDIIGDIRQAHCNISEKQWNDTLQKVGKELKKHFPNKTIKYAQSAGGDMEITTHSFNCGGEFFYCNTAKLFNGTYNGTDISTNSSADSNSTITLQCRIKQIINMWQGVGRCMYAPPIAGNITCKSHITGLLLTRDGGTNSSGKEEIFRPAGGDMRDNWRSELYKYKVVEIQPLGIAPTGCKRRVVERRRRRRAAGLGALFLGFLGAAGSTMGAASITLTVQARQLLSGIVQQQSNLLRAPEAQQHMLQLTVWGIKQLQARVLALERYLKDQQLLGMWGCSGKLICCTNVPWNTSWSNKSETDIWDNMTWMQWEREISNYTETIYKLLEDSQNQQERNEQDLLALD

SEQ ID NO: 159 - protein, 649 aa, Artificial Sequence
  Description of Artificial Sequence: Synthetic polypeptide
MPMGSLQPLATLYLLGMLVASVLAAENLWVTVYYGVPVWKEAKTTLFCASDARAYEKEVHNVWATHACVPTDPSPQELFLKNVTENFNMWKNDMVDQMHEDIISLWDQSLKPCVKLTPLCVTLICSNATVKNRTVEEMKNCSFNTTTEIRDKEKKEYALFYKPDVVPLDETNNTSEYRLINCNTSACTQACPKVTFEPIPIHYCAPAGYAILKCNNETFNGTGPCSNVSTVQCTHGIRPVVSTQLLLNGSLAEKEIVIRSENLTNNAKIIIVHLNTPVEIVCTRPNNNTRKSVRIGPGQTFYATGDIIGDIRQAHCNISEKQWNDTLQKVGKELKKHFPNKTIKYAQSAGGDMEITTHSFNCGGEFFYCNTAKLFNGTYNGTDISTNSSADSNSTITLQCRIKQIINMWQGVGRCMYAPPIAGNITCKSHITGLLLTRDGGTNSSGKEEIFRPAGGDMRDNWRSELYKYKVVKIEPLGVAPTRCKRRVVGRRRRRRAVGIGAVFLGFLGAAGSTMGAASMTLTVQARNLLSGIVQQQSNLLRAPEAQQHLLKLTVWGIKQLQARVLAVERYLRDQQLLGIWGCSGKLICCTNVPWNSSWSNRNLSEIWDNMTWLQWDKEISNYTQIIYGLLEESQNQQEKNEQDLLALD

SEQ ID NO: 160 - protein, 663 aa, Artificial Sequence
  Description of Artificial Sequence: Synthetic polypeptide
MPMGSLQPLATLYLLGMLVASVLAEGNLWVTVYYGVPVWKEAKTTLFCASDAKAYKKEVHNVWATHACVPTDPSPQELFLKNVTENFNMWKNDMVDQMHEDIISLWDQSLKPCVKLTPLCVTLICSNAIVKNSTTEKMSNVTVNNITIEEMKNCSFNTTTEIRDKIKKERALFYRPDIVPLNDETNNTSKYRLINCNTSACTQACPKVTFEPIPIHYCAPAGYAILKCNDETFNGTGPCSNVSTVQCTHGIRPVVSTQLLLNGSLAEKEIVIRSENLTNNAKIIIVHLHAPVEIVCTRPYNNTRKSVRIGPGQTFYATGDIIGDPRQAHCNISKEIWNKTLQEVGKELQKHFPNKTIRYNQSAGGDMEITTHSFNCGGEFFYCNTSNLFNSTYNDTYISPNSTNSTSIITLQCKIKQIINMWQGVGRCMYAPPIAGNITCKSNITGLLLTRDGGINNVSNETETFRPAGGDMRDNWRSELYKYKVVEVQPLGIAPTGCKRRVVERRRRRRAVGLGALFLGFLGAAGSTMGAASITLTVQARQLLSGIVQQQSNLLRAPEAQQHMLQLTVWGIKQLQARVLALERYLKDQQLLGIWGCSGKLICCTNVPWNTSWSNKSETDIWNNMTWMQWEREISNYTGTIYKLLEDSQNQQERNEKDLLALD

SEQ ID NO: 161 - protein, 674 aa, Artificial Sequence
  Description of Artificial Sequence: Synthetic polypeptide
MDAMKRGLCCVLLLCGAVFVSPSQEIHARFRRGAREGNLWVTVYYGVPVWKEAKTTLFCASDAKAYKKEVHNVWATHACVPTDPSPQELFLKNVTENFNMWKNDMVDQMHEDIISLWDQSLKPCVKLTPLCVTLICSNAIVKNSTTEKMSNVTVNNITIEEMKNCSFNTTTEIRDKIKKERALFYRPDIVPLNDETNNTSKYRLINCNTSACTQACPKVTFEPIPIHYCAPAGYAILKCNDETFNGTGPCSNVSTVQCTHGIRPVVSTQLLLNGSLAEKEIVIRSENLTNNAKIIIVHLHAPVEIVCTRPYNNTRKSVRIGPGQTFYATGDIIGDPRQAHCNISKEIWNKTLQEVGKELQKHFPNKTIRYNQSAGGDMEITTHSFNCGGEFFYCNTSNLFNSTYNDTYISPNSTNSTSIITLQCKIKQIINMWQGVGRCMYAPPIAGNITCKSNITGLLLTRDGGINNVSNETETFRPAGGDMRDNWRSELYKYKVVEVQPLGIAPTGCKRRVVERRRRRRAVGLGALFLGFLGAAGSTMGAASITLTVQARQLLSGIVQQQSNLLRAPEAQQHMLQLTVWGIKQLQARVLALERYLKDQQLLGIWGCSGKLICCTNVPWNTSWSNKSETDIWNNMTWMQWEREISNYTGTIYKLLEDSQNQQERNEKDLLALD

SEQ ID NO: 162 - protein, 663 aa, Artificial Sequence
  Description of Artificial Sequence: Synthetic polypeptide
MPMGSLQPLATLYLLGMLVASVLAAENLWVTVYYGVPVWKEAKTTLFCASDAKAYKKEVHNVWATHACVPTDPSPQELFLKNVTENFNMWKNDMVDQMHEDIISLWDQSLKPCVKLTPLCVTLICSNAIVKNSTTEKMSNVTVNNITIEEMKNCSFNTTTEIRDKIKKERALFYRPDIVPLNDETNNTSKYRLINCNTSACTQACPKVTFEPIPIHYCAPAGYAILKCNDETFNGTGPCSNVSTVQCTHGIRPVVSTQLLLNGSLAEKEIVIRSENLTNNAKIIIVHLHAPVEIVCTRPYNNTRKSVRIGPGQTFYATGDIIGDPRQAHCNISKEIWNKTLQEVGKELQKHFPNKTIRYNQSAGGDMEITTHSFNCGGEFFYCNTSNLFNSTYNDTYISPNSTNSTSIITLQCKIKQIINMWQGVGRCMYAPPIAGNITCKSNITGLLLTRDGGINNVSNETETFRPAGGDMRDNWRSELYKYKVVKIEPLGVAPTRCKRRVVGRRRRRRAVGIGAVFLGFLGAAGSTMGAASMTLTVQARNLLSGIVQQQSNLLRAPEAQQHLLKLTVWGIKQLQARVLAVERYLRDQQLLGIWGCSGKLICCTNVPWNSSWSNRNLSEIWDNMTWLQWDKEISNYTQIIYGLLEESQNQQEKNEQDLLALD

SEQ ID NO: 163 - protein, 650 aa, Artificial Sequence
  Description of Artificial Sequence: Synthetic polypeptide
MPMGSLQPLATLYLLGMLVASVLAEGNLWVTVYYGVPVWKEAKTTLFCASDAKAYVKEVHNVWATHACVPTDPSPQELFLKNVTENFNMWKNDMVDQMHEDIISLWDQSLKPCVKLTPLCVTLICSTATVNNSKFEEMKNCSFNTTTEIRDKEKKEYALFYRPDIVPLDNETSNISEYRLINCNTSACTQACPKVTFEPIPIHYCAPAGYAILKCNDETFNGTGPCSNVSTVQCTHGIRPVVSTQLLLNGSLAEKEIVIRSENLTNNAKIIIVHLHTPVEIVCTRPNNNTRKSVRIGPGQTFYATGDIIGNPRQAHCNISKERWNDTLQKVGKELQKHFPNKTIKYNQSAGGDMEITTHSFNCGGEFFYCNTSNLFNSTYNDTYISTNSTNSTSYITLQCRIKQIINMWQGVGRCMYAPPIAGNITCKSNITGLLLTRDGGINKDSNETETFRPAGGDMRDNWRSELYKYKVVEVQPLGIAPTGCKRRVVERRRRRRAAGLGALFLGFLGAAGSTMGAASITLTVQARQLLSGIVQQQSNLLRAPEAQQHMLQLTVWGIKQLQARVLALERYLKDQQLLGMWGCSGKLICCTNVPWNTSWSNKSETDIWDNMTWMQWEREISNYTGTIYKLLEDSQNQQERNEQDLLALD

SEQ ID NO: 164 - protein, 661 aa, Artificial Sequence
  Description of Artificial Sequence: Synthetic polypeptide
MDAMKRGLCCVLLLCGAVFVSPSQEIHARFRRGAREGNLWVTVYYGVPVWKEAKTTLFCASDAKAYVKEVHNVWATHACVPTDPSPQELFLKNVTENFNMWKNDMVDQMHEDIISLWDQSLKPCVKLTPLCVTLICSTATVNNSKFEEMKNCSFNTTTEIRDKEKKEYALFYRPDIVPLDNETSNISEYRLINCNTSACTQACPKVTFEPIPIHYCAPAGYAILKCNDETFNGTGPCSNVSTVQCTHGIRPVVSTQLLLNGSLAEKEIVIRSENLTNNAKIIIVHLHTPVEIVCTRPNNNTRKSVRIGPGQTFYATGDIIGNPRQAHCNISKERWNDTLQKVGKELQKHFPNKTIKYNQSAGGDMEITTHSFNCGGEFFYCNTSNLFNSTYNDTYISTNSTNSTSYITLQCRIKQIINMWQGVGRCMYAPPIAGNITCKSNITGLLLTRDGGINKDSNETETFRPAGGDMRDNWRSELYKYKVVEVQPLGIAPTGCKRRVVERRRRRRAAGLGALFLGFLGAAGSTMGAASITLTVQARQLLSGIVQQQSNLLRAPEAQQHMLQLTVWGIKQLQARVLALERYLKDQQLLGMWGCSGKLICCTNVPWNTSWSNKSETDIWDNMTWMQWEREISNYTGTIYKLLEDSQNQQERNEQDLLALD

SEQ ID NO: 165 - protein, 650 aa, Artificial Sequence
  Description of Artificial Sequence: Synthetic polypeptide
MPMGSLQPLATLYLLGMLVASVLAAENLVTVYYGVPVWKEAKTTLFCASDAKAYVKEVHNVWATHACVPTDPSPQELFLKNVTENFNMWKNDMVDQMHEDIISLWDQSLKPCVKLTPLCVTLICSTATVNNSKFEEMKNCSFNTTTEIRDKEKKEYALFYRPDIVPLDNETSNISEYRLINCNTSACTQACPKVTFEPIPIHYCAPAGYAILKCNDETFNGTGPCSNVSTVQCTHGIRPVVSTQLLLNGSLAEKEIVIRSENLTNNAKIIIVHLHTPVEIVCTRPNNNTRKSVRIGPGQTFYATGDIIGNPRQAHCNISKERWNDTLQKVGKELQKHFPNKTIKYNQSAGGDMEITTHSFNCGGEFFYCNTSNLFNSTYNDTYISTNSTNSTSYITLQCRIKQIINMWQGVGRCMYAPPIAGNITCKSNITGLLLTRDGGINKDSNETETFRPAGGDMRDNWRRSELYKYKVVKIEPLGVAPTRCKRRVVGRRRRRRAVGIGAVFLGFLGAAGSTMGAASMTLTVQARNLLSGIVQQQSNLLRAPEAQQHLLKLTVWGIKQLQARVLAVERYLRDQQLLGIWGCSGKLICCTNVPWNSSWSNRNLSEIWDNMTWLQWDKEISNYTQIIYGLLEESQNQQEKNEQDLLALD

SEQ ID NO: 166 - DNA, 1999 bp, Artificial Sequence
  Description of Artificial Sequence: Synthetic polynucleotide
gtcgacaagcttcccgggccaccatgcccatgggctccctgcagcccctggccaccctgtacctgctgggcatgctggtggcctccgtgctggccgccgagaacctgtgggtgaccgtgtactacggcgtgcccgtgtggaaggaggccaagaccaccctgttctgcgcctccgacgccaaggcctacgagaaggaggtgcacaacgtgtgggccacccacgcctgcgtgcccaccgacccctccccccaggagctggtgctgaagaacgtgaccgagaacttcaacatgtggaagaacgacatggtggaccagatgcacgaggacatcatctccctgtgggaccagtccctgaagccctgcgtgaagctgacccccctgtgcgtgaccctgaactgctccaacgcccgctccaacgtgaacgtgacctccatcaacaacaccatcatgggcgagatgaagaactgctccttcaacaccaccaccgagatccgcgacaaggagaagaaggagtacgccctgttctacaagcccgacgtggtgcccctgaacgagacctccaacacctccgagtaccgcctgatcaactgcaacacctccgcctgcacccaggcctgccccaaggtgaccttcgagcccatccccatccactactgcgcccccgccggctacgccatcctgaagtgcaacaacaagaccttcaacggcaccggcccctgctccaacgtgtccaccgtgcagtgcacccacggcatccgccccgtggtgtccacccagctgctgctgaacggctccctggccgagaaggagatcgtgatccgctccgagaacctgaccaacaacgccaagatcatcatcgtgcacctgaacacctccgtggagatcgtgtgcacccgccccggcaacaacacccgcaagtccgtgcgcatcggccccggccagaccttctacgccaccggcgacatcatcggcgacatccgccaggcccactgcaacatctccgagggccagtggaacaagaccctgcacgaggtgtccaaggagctgcagaagcacttccccaacaagaccatcaagtacgagcgctccgccggcggcgacatggagatcgccacccactccttcaactgcggcggcgagttcttctactgcaacacctccaacctgttcaacggcacctacaacggcacctacatcaacacctcctccacctcctacatcaccctgcagtgccgcatcaagcagatcatcaacatgtggcagggcgtgggccgctgcatgtacgccccccccatcgccggcaacatcacctgcaagtccaacatcaccggcctgctgctgacccgcgacggcggcaccaagaacaactccaacgaggagaccttccgccccgccggcggcgacatgcgcgacaactggcgctccgagctgtacaagtacaaggtggtgaagatcgagcccctgggcgtggcccccacccgctgcaagcgccgcgtggtgggccgccgccgccgccgccgcgccgtgggcatcggcgccgtgttcctgggcttcctgggcgccgccggctccaccatgggcgccgcctccatgaccctgaccgtgcaggcccgcaacctgctgtccggcatcgtgcagcagcagtccaacctgctgcgcgcccccgaggcccagcagcacctgctgaagctgaccgtgtggggcatcaagcagctgcaggcccgcgtgctggccgtggagcgctacctgcgcgaccagcagctgctgggcatctggggctgctccggcaagctgatctgctgcaccaacgtgccctggaactcctcctggtccaaccgcaacctgtccgagatctgggacaacatgacctggctgcagtgggacaaggagatctccaactacacccagatcatctacggcctgctggaggagtcccagaaccagcaggagaagaacgagcaggacctgctggccctggactagtaagcggccgcggatcc

SEQ ID NO: 167 - DNA, 1999 bp, Artificial Sequence
  Description of Artificial Sequence: Synthetic polynucleotide
gtcgacaagcttcccgggccaccatgcccatgggctccctgcagcccctggccaccctgtacctgctgggcatgctggtggcctccgtgctggccgccgagaacctgtgggtgaccgtgtactacggcgtgcccgtgtggaaggaggccaagaccaccctgttctgcgcctccgacgccaaggcctacgagaagaaggtgcacaacgtgtgggccacccacgcctgcgtgcccaccgacccctccccccaggagctggtgctgaagaacgtgaccgagaacttcaacatgtggaagaacgacatggtggaccagatgcacgaggacatcatctccctgtgggaccagtccctgaagccctgcgtgaagctgacccccctgtgcgtgaccctgaactgctccaacgcccgctccaacgtgaacgtgacctccatcaacaacaccatcatgggcgagatgaagaactgctccttcaacaccaccaccgagatccgcgacaaggagaagaaggagtacgccctgttctacaagcccgacgtggtgcccctgaacgagacctccaacacctccgagtaccgcctgatcaactgcaacacctccgccgtgacccaggcctgccccaaggtgaccttcgagcccatccccatccactactgcgcccccgccggctacgccatcctgaagtgcaacaacaagaccttcaacggcaccggcccctgctccaacgtgtccaccgtgcagtgcacccacggcatccgccccgtggtgtccacccagctgctgctgaacggctccctggccgagaaggagatcgtgatccgctccgagaacctgaccaacaacgccaagatcatcatcgtgcacctgaacacctccgtggagatcgtgtgcacccgccccggcaacaacacccgcaagtccgtgcgcatcggccccggccagtggttctacgccaccggcgacatcatcggcgacatccgccaggcccactgcaacatctccgagggccagtggaacaagaccctgcacgaggtgtccaaggagctgcagaagcacttccccaacaagaccatcaagtacgagcgctccgccggcggcgacatggagatcgccacccactccttcaactgcggcggcgagttcttctactgcaacacctccaacctgttcaacggcacctacaacggcacctacatcaacacctcctccacctcctacatcaccctgcagtgccgcatcaagcagatcatcaacatgtggcagggcgtgggccgcgccatgtacgccccccccatcgccggcaacatcacctgcaagtccaacatcaccggcctgctgctgacccgcgacggcggcaccaagaacaactccaacgaggagaccttccgccccgccggcggcgacatgcgcgacaactggcgctccgagctgtacaagtacaaggtggtgaagatcgagcccctgggcgtggcccccacccgctgcaagcgccgcgtggtgggccgccgccgccgccgccgcgccgtgggcatcggcgccgtgttcctgggcttcctgggcgccgccggctccaccatgggcgccgcctccatgaccctgaccgtgcaggcccgcaacctgctgtccggcatcgtgcagcagcagtccaacctgctgcgcgcccccgaggcccagcagcacctgctgaagctgaccgtgtggggcatcaagcagctgcaggcccgcgtgctggccgtggagcgctacctgcgcgaccagcagctgctgggcatctggggctgctccggcaagctgatctgctgcaccaacgtgccctggaactcctcctggtccaaccgcaacctgtccgagatctgggacaacatgacctggctgcagtgggacaaggagatctccaactacacccagatcatctacggcctgctggaggagtcccagaaccagcaggagaagaacgagcaggacctgctggccctggactagtaagcggccgcggatcc

SEQ ID NO: 168 - DNA, 1999 bp, Artificial Sequence
  Description of Artificial Sequence: Synthetic polynucleotide
gtcgacaagcttcccgggccaccatgcccatgggctccctgcagcccctggccaccctgtacctgctgggcatgctggtggcctccgtgctggccgccgagaacctgtgggtgaccgtgtactacggcgtgcccgtgtggaaggaggccaagaccaccctgttctgcgcctccgacgccaaggcctacgagaaggaggtgcacaacgtgtgggccacccacgcctgcgtgcccaccgacccctccccccaggagctggtgctgaagaacgtgaccgagaacttcaacatgtggaagaacgacatggtggaccagatgcacgaggacatcatctccctgtgggaccagtccctgaagccctgcgtgaagctgacccccctgtgcgtgaccctgaactgctccaacgcccgctccaacgtgaacgtgacctccatcaacaacaccatcatgggcgagatgaagaactgctccttcaacaccaccaccgagatccgcgacaaggagaagaaggagtacgccctgttctacaagcccgacgtggtgcccctgaacgagacctccaacacctccgagtaccgcctgatcaactgcaacacctccgcctgcacccaggcctgccccaaggtgaccttcgagcccatccccatccactactgcgcccccgccggctacgccatcctgaagtgcaacaacaagaccttcaacggcaccggcccctgctccaacgtgtccaccgtgcagtgcacccacggcatccgccccgtggtgtccacccagctgctgctgaacggctccctggccgagaaggagatcgtgatccgctccgagaacctgaccaacaacgccaagatcatcatcgtgcacctgaacacctccgtggagatcgtgtgcacccgccccggcaacaacacccgcaagtccgtgcgcatcggccccggccagaccttctacgccaccggcgacatcatcggcgacatccgccaggcccactgcaacatctccgagggccagtggaacaagaccctgcacgaggtgtccaaggagctgcagaagcacttccccaacaagaccatcaagtacgagcgctccgccggcggccgcatggagatcgccacccactccttcaactgcggcggcgagttcttctactgcaacacctccaacctgttcaacggcacctacaacggcacctacatcaacacctcctccacctcctacatcaccctgcagtgccgcatcaagcagatcatcaacatgtggcagggcgtgggccgctgcatgtacgccccccccatcgccggcaacatcacctgcaagtccaacatcaccggcctgctgctgacccgcgacggcggcaccaagaacaactccaacgaggagaccttccgccccgccggcggcgacatgcgcgacaactggcgctccgagctgtacaagtacaaggtggtgaagatcgagcccctgggcgtggcccccacccgctgcaagcgccgcgtggtgggccgccgccgccgccgccgcgccgtgggcatcggcgccgtgttcctgggcttcctgggcgccgccggctccaccatgggcgccgcctccatgaccctgaccgtgcaggcccgcaacctgctgtccggcatcgtgcagcagcagtccaacctgctgcgcgcccccgaggcccagcagcacctgctgaagctgaccgtgtggggcatcaagcagctgcaggcccgcgtgctggccgtggagcgctacctgcgcgaccagcagctgctgggcatctggggctgctccggcaagctgatctgctgcaccaacgtgccctggaactcctcctggtccaaccgcaacctgtccgagatctgggacaacatgacctggctgcagtgggacaaggagatctccaactacacccagatcatctacggcctgctggaggagtcccagaaccagcaggagaagaacgagcaggacctgctggccctggactagtaagcggccgcggatcc

SEQ ID NO: 169 - DNA, 2017 bp, Artificial Sequence
  Description of Artificial Sequence: Synthetic polynucleotide
gtcgacaagcttcccgggccaccatgcccatgggctccctgcagcccctggccaccctgtacctgctgggcatgctggtggcctccgtgctggccgccgagaacctgtgggtgaccgtgtactacggcgtgcccgtgtggaaggaggccaagaccaccctgttctgcgcctccgacgccaaggcctacgagaaggaggtgcacaacgtgtgggccacccacgcctgcgtgcccaccgacccctccccccaggagctggtgctgaagaacgtgaccgagaacttcaacatgtggaagaacgacatggtggaccagatgcacgaggacatcatctccctgtgggaccagtccctgaagccctgcgtgaagctgacccccctgtgcgtgaccctgaactgctccaacgcccgctccaacgtgaacgtgacctccatcaacaacaccatcatgggcgagatgaagaactgctccttcaacaccaccaccgagatccgcgacaaggagaagaaggagtacgccctgttctacaagcccgacgtggtgcccctgaacgagacctccaacacctccgagtaccgcctgatcaactgcaacacctccgcctgcacccaggcctgccccaaggtgaccttcgagcccatccccatccactactgcgcccccgccggctacgccatcctgaagtgcaacaacaagaccttcaacggcaccggcccctgctccaacgtgtccaccgtgcagtgcacccacggcatccgccccgtggtgtccacccagctgctgctgaacggctccctggccgagaaggagatcgtgatccgctccgagaacctgaccaacaacgccaagatcatcatcgtgcacctgaacacctccgtggagatcgtgtgcacccgccccggcaacaacacccgcaagtccgtgcgcatcggccccggccagaccttctacgccaccggcgacatcatcggcgacatccgccaggcccactgcaacatctccgagggccagtggaacaagaccctgcacgaggtgtccaaggagctgcagaagcacttccccaacaagaccatcaagtacgagcgctccgccggcggcgacatggagatcgccacccactccttcaactgcggcggcgagttcttctactgcaacacctccaacctgttcaacggcacctacaacggcacctacatcaacacctcctccacctcctacatcaccctgcagtgccgcatcaagcagatcatcaacatgtggcagggcgtgggccgctgcatgtacgccccccccatcgccggcaacatcacctgcaagtccaacatcaccggcctgctgctgacccgcgacggcggcaccaagaacaactccaacgaggagaccttccgccccgccggcggcgacatgcgcgacaactggcgctccgagctgtacaagtacaaggtggtgaagatcgagcccctgggcgtggcccccacccgctgcaagcgccgcgtggtgggccgccgccgccgccgccgcgccgtgggcatcggcgccgtgttcctgggcttcctgggcgccgccggctccaccatgggcgccgcctccatgaccctgaccgtgcaggcccgcaacctgctgtccggcatcgtgcagcagcagtccaacctgctgcgcgcccccgaggcccagcagcacctgctgaagctgaccgtgtggggcatcaagcagctgcaggcccgcgtgctggccgtggagcgctacctgcgcgaccagcagctgctgggcatctggggctgctccggcaagctgatctgctgcaccaacgtgccctggaactcctcctggtccaaccgcaacctgtccgagatctgggacaacatgacctggctgcagtgggacaaggagatctccaactacacccagatcatctacggcctgctggaggagtcccagaaccagcaggagaagaacgagcaggacctgctggccctggacctgcctgagaccggaggatagtaagcggccgcggatcc

SEQ ID NO: 170 - DNA, 2503 bp, Artificial Sequence
  Description of Artificial Sequence: Synthetic polynucleotide
gtcgacaagcttcccgggccaccatgcccatgggctccctgcagcccctggccaccctgtacctgctgggcatgctggtggcctccgtgctggccgccgagaacctgtgggtgaccgtgtactacggcgtgcccgtgtggaaggaggccaagaccaccctgttctgcgcctccgacgccaaggcctacgagaaggaggtgcacaacgtgtgggccacccacgcctgcgtgcccaccgacccctccccccaggagctggtgctgaagaacgtgaccgagaacttcaacatgtggaagaacgacatggtggaccagatgcacgaggacatcatctccctgtgggaccagtccctgaagccctgcgtgaagctgacccccctgtgcgtgaccctgaactgctccaacgcccgctccaacgtgaacgtgacctccatcaacaacaccatcatgggcgagatgaagaactgctccttcaacaccaccaccgagatccgcgacaaggagaagaaggagtacgccctgttctacaagcccgacgtggtgcccctgaacgagacctccaacacctccgagtaccgcctgatcaactgcaacacctccgcctgcacccaggcctgccccaaggtgaccttcgagcccatccccatccactactgcgcccccgccggctacgccatcctgaagtgcaacaacaagaccttcaacggcaccggcccctgctccaacgtgtccaccgtgcagtgcacccacggcatccgccccgtggtgtccacccagctgctgctgaacggctccctggccgagaaggagatcgtgatccgctccgagaacctgaccaacaacgccaagatcatcatcgtgcacctgaacacctccgtggagatcgtgtgcacccgccccggcaacaacacccgcaagtccgtgcgcatcggccccggccagaccttctacgccaccggcgacatcatcggcgacatccgccaggcccactgcaacatctccgagggccagtggaacaagaccctgcacgaggtgtccaaggagctgcagaagcacttccccaacaagaccatcaagtacgagcgctccgccggcggcgacatggagatcgccacccactccttcaactgcggcggcgagttcttctactgcaacacctccaacctgttcaacggcacctacaacggcacctacatcaacacctcctccacctcctacatcaccctgcagtgccgcatcaagcagatcatcaacatgtggcagggcgtgggccgctgcatgtacgccccccccatcgccggcaacatcacctgcaagtccaacatcaccggcctgctgctgacccgcgacggcggcaccaagaacaactccaacgaggagaccttccgccccgccggcggcgacatgcgcgacaactggcgctccgagctgtacaagtacaaggtggtgaagatcgagcccctgggcgtggcccccacccgctgcaagcgccgcgtggtgggccgccgccgccgccgccgcgccgtgggcatcggcgccgtgttcctgggcttcctgggcgccgccggctccaccatgggcgccgcctccatgaccctgaccgtgcaggcccgcaacctgctgtccggcatcgtgcagcagcagtccaacctgctgcgcgcccccgaggcccagcagcacctgctgaagctgaccgtgtggggcatcaagcagctgcaggcccgcgtgctggccgtggagcgctacctgcgcgaccagcagctgctgggcatctggggctgctccggcaagctgatctgctgcaccaacgtgccctggaactcctcctggtccaaccgcaacctgtccgagatctgggacaacatgacctggctgcagtgggacaaggagatctccaactacacccagatcatctacggcctgctggaggagtcccagaaccagcaggagaagaacgagcaggacctgctggccctggacggtggtggaagcggagatatcatcaagctgctgaacgagcaagtgaacaaagagatgaacagctccaacctgtacatgagcatgtccagctggtgctacacccacagccttgatggcgccggactgttcctgtttgatcacgccgccgaggaatacgagcacgccaagaagctgatcattttcctgaacgagaacaacgtgccagtgcagctgaccagcattagcgccccagagcacaagttcgagggcctgacacagatctttcagaaggcctacgaacacgagcagcacatctccgagagcatcaacaacatcgtggaccacgccattaagagcaaggatcacgccaccttcaattttctgcagtggtacgtggccgaacagcacgaggaagaagtgctgttcaaggacatcctggacaagattgagctgatcggcaacgagaaccacggcctgtatctggccgaccagtacgtgaagggaatcgccaagagccggaagtcctagtaagcggccgcggatcc

SEQ ID NO: 171 - DNA, 2029 bp, Artificial Sequence
  Description of Artificial Sequence: Synthetic polynucleotide
gtcgacaagcttcccgggccaccatgcccatgggctccctgcagcccctggccaccctgtacctgctgggcatgctggtggcctccgtgctggccgccgagaacctgtgggtgaccgtgtactacggcgtgcccgtgtggaaggaggccaagaccaccctgttctgcgcctccgacgccaaggcctacaagaaggaggtgcacaacgtgtgggccacccacgcctgcgtgcccaccgacccctccccccaggagctgttcctgaagaacgtgaccgagaacttcaacatgtggaagaacgacatggtggaccagatgcacgaggacatcatctccctgtgggaccagtccctgaagccctgcgtgaagctgacccccctgtgcgtgaccctgatctgctccaacgccatcgtgaagaactccaccaccgaggagatgtccaccgccctggtgaagaactccaccaccgaggccatgaagaactgctccttcaacaccaccaccgagatccgcgacaaggagaagaaggagtacgccctgttctaccgccccgacatcgtgcccctgaacaacgagaccggcaacatctccgagtaccgcctgatcaactgcaacacctccgcctgcacccaggcctgccccaaggtgaccttcgagcccatccccatccactactgcgcccccgccggctacgccatcctgaagtgcaacgacgagaccttcaacggcaccggcccctgctccaacgtgtccaccgtgcagtgcacccacggcatccgccccgtggtgtccacccagctgctgctgaacggctccctggccaaggaggagatcgtgatccgctccgagaacctgaccaacaacgccaagatcatcatcgtgcacctgcacacccccgtggagatcgtgtgcacccgccccaacaacaacacccgcaagtccgtgcgcatcggccccggccagaccttctacgccaccggcgacatcatcggcgacccccgcaaggcccactgcaacatctccgagaaggactggaacaagaccctgcaggaggtgggcaaggagctgcagaagcacttccccaacaagaccatccgctacaaccagtccgccggcggcgacatggagatcaccacccactccttcaactgcggcggcgagttcttctactgcaacacctccaagctgttcaactccacctacaacgacacctacatctccaccaactcctccgccaacaactcctccaccatcaccctgcagtgccgcatcaagcagatcatcaacatgtggcagggcgtgggccgctgcatgtacgccccccccatcgccggcaacatcacctgcaagtccaacatcaccggcctgctgctgacccgcgacggcggccccgactccaacgagaccgagaccttccgccccgccggcggcgacatgcgcgacaactggcgctccgagctgtacaagtacaaggtggtgaagatcgagcccctgggcgtggcccccacccgctgcaagcgccgcgtggtgggccgccgccgccgccgccgcgccgtgggcatcggcgccgtgttcctgggcttcctgggcgccgccggctccaccatgggcgccgcctccatgaccctgaccgtgcaggcccgcaacctgctgtccggcatcgtgcagcagcagtccaacctgctgcgcgcccccgaggcccagcagcacctgctgaagctgaccgtgtggggcatcaagcagctgcaggcccgcgtgctggccgtggagcgctacctgcgcgaccagcagctgctgggcatctggggctgctccggcaagctgatctgctgcaccaacgtgccctggaactcctcctggtccaaccgcaacctgtccgagatctgggacaacatgacctggctgcagtgggacaaggagatctccaactacacccagatcatctacggcctgctggaggagtcccagaaccagcaggagaagaacgagcaggacctgctggccctggactagtaagcggccgcggatcc

SEQ ID NO: 172 - DNA, 2029 bp, Artificial Sequence
  Description of Artificial Sequence: Synthetic polynucleotide
gtcgacaagcttcccgggccaccatgcccatgggctccctgcagcccctggccaccctgtacctgctgggcatgctggtggcctccgtgctggccgccgagaacctgtgggtgaccgtgtactacggcgtgcccgtgtggaaggaggccaagaccaccctgttctgcgcctccgacgccaaggcctacaagaagaaggtgcacaacgtgtgggccacccacgcctgcgtgcccaccgacccctccccccaggagctgttcctgaagaacgtgaccgagaacttcaacatgtggaagaacgacatggtggaccagatgcacgaggacatcatctccctgtgggaccagtccctgaagccctgcgtgaagctgacccccctgtgcgtgaccctgatctgctccaacgccatcgtgaagaactccaccaccgaggagatgtccaccgccctggtgaagaactccaccaccgaggccatgaagaactgctccttcaacaccaccaccgagatccgcgacaaggagaagaaggagtacgccctgttctaccgccccgacatcgtgcccctgaacaacgagaccggcaacatctccgagtaccgcctgatcaactgcaacacctccgccgtgacccaggcctgccccaaggtgaccttcgagcccatccccatccactactgcgcccccgccggctacgccatcctgaagtgcaacgacgagaccttcaacggcaccggcccctgctccaacgtgtccaccgtgcagtgcacccacggcatccgccccgtggtgtccacccagctgctgctgaacggctccctggccaaggaggagatcgtgatccgctccgagaacctgaccaacaacgccaagatcatcatcgtgcacctgcacacccccgtggagatcgtgtgcacccgccccaacaacaacacccgcaagtccgtgcgcatcggccccggccagtggttctacgccaccggcgacatcatcggcgacccccgcaaggcccactgcaacatctccgagaaggactggaacaagaccctgcaggaggtgggcaaggagctgcagaagcacttccccaacaagaccatccgctacaaccagtccgccggcggcgacatggagatcaccacccactccttcaactgcggcggcgagttcttctactgcaacacctccaagctgttcaactccacctacaacgacacctacatctccaccaactcctccgccaacaactcctccaccatcaccctgcagtgccgcatcaagcagatcatcaacatgtggcagggcgtgggccgcgccatgtacgccccccccatcgccggcaacatcacctgcaagtccaacatcaccggcctgctgctgacccgcgacggcggccccgactccaacgagaccgagaccttccgccccgccggcggcgacatgcgcgacaactggcgctccgagctgtacaagtacaaggtggtgaagatcgagcccctgggcgtggcccccacccgctgcaagcgccgcgtggtgggccgccgccgccgccgccgcgccgtgggcatcggcgccgtgttcctgggcttcctgggcgccgccggctccaccatgggcgccgcctccatgaccctgaccgtgcaggcccgcaacctgctgtccggcatcgtgcagcagcagtccaacctgctgcgcgcccccgaggcccagcagcacctgctgaagctgaccgtgtggggcatcaagcagctgcaggcccgcgtgctggccgtggagcgctacctgcgcgaccagcagctgctgggcatctggggctgctccggcaagctgatctgctgcaccaacgtgccctggaactcctcctggtccaaccgcaacctgtccgagatctgggacaacatgacctggctgcagtgggacaaggagatctccaactacacccagatcatctacggcctgctggaggagtcccagaaccagcaggagaagaacgagcaggacctgctggccctggactagtaagcggccgcggatcc

SEQ ID NO: 173 - DNA, 2029 bp, Artificial Sequence
  Description of Artificial Sequence: Synthetic polynucleotide
gtcgacaagcttcccgggccaccatgcccatgggctccctgcagcccctggccaccctgtacctgctgggcatgctggtggcctccgtgctggccgccgagaacctgtgggtgaccgtgtactacggcgtgcccgtgtggaaggaggccaagaccaccctgttctgcgcctccgacgccaaggcctacaagaaggaggtgcacaacgtgtgggccacccacgcctgcgtgcccaccgacccctccccccaggagctgttcctgaagaacgtgaccgagaacttcaacatgtggaagaacgacatggtggaccagatgcacgaggacatcatctccctgtgggaccagtccctgaagccctgcgtgaagctgacccccctgtgcgtgaccctgatctgctccaacgccatcgtgaagaactccaccaccgaggagatgtccaccgccctggtgaagaactccaccaccgaggccatgaagaactgctccttcaacaccaccaccgagatccgcgacaaggagaagaaggagtacgccctgttctaccgccccgacatcgtgcccctgaacaacgagaccggcaacatctccgagtaccgcctgatcaactgcaacacctccgcctgcacccaggcctgccccaaggtgaccttcgagcccatccccatccactactgcgcccccgccggctacgccatcctgaagtgcaacgacgagaccttcaacggcaccggcccctgctccaacgtgtccaccgtgcagtgcacccacggcatccgccccgtggtgtccacccagctgctgctgaacggctccctggccaaggaggagatcgtgatccgctccgagaacctgaccaacaacgccaagatcatcatcgtgcacctgcacacccccgtggagatcgtgtgcacccgccccaacaacaacacccgcaagtccgtgcgcatcggccccggccagaccttctacgccaccggcgacatcatcggcgacccccgcaaggcccactgcaacatctccgagaaggactggaacaagaccctgcaggaggtgggcaaggagctgcagaagcacttccccaacaagaccatccgctacaaccagtccgccggcggccgcatggagatcaccacccactccttcaactgcggcggcgagttcttctactgcaacacctccaagctgttcaactccacctacaacgacacctacatctccaccaactcctccgccaacaactcctccaccatcaccctgcagtgccgcatcaagcagatcatcaacatgtggcagggcgtgggccgctgcatgtacgccccccccatcgccggcaacatcacctgcaagtccaacatcaccggcctgctgctgacccgcgacggcggccccgactccaacgagaccgagaccttccgccccgccggcggcgacatgcgcgacaactggcgctccgagctgtacaagtacaaggtggtgaagatcgagcccctgggcgtggcccccacccgctgcaagcgccgcgtggtgggccgccgccgccgccgccgcgccgtgggcatcggcgccgtgttcctgggcttcctgggcgccgccggctccaccatgggcgccgcctccatgaccctgaccgtgcaggcccgcaacctgctgtccggcatcgtgcagcagcagtccaacctgctgcgcgcccccgaggcccagcagcacctgctgaagctgaccgtgtggggcatcaagcagctgcaggcccgcgtgctggccgtggagcgctacctgcgcgaccagcagctgctgggcatctggggctgctccggcaagctgatctgctgcaccaacgtgccctggaactcctcctggtccaaccgcaacctgtccgagatctgggacaacatgacctggctgcagtgggacaaggagatctccaactacacccagatcatctacggcctgctggaggagtcccagaaccagcaggagaagaacgagcaggacctgctggccctggactagtaagcggccgcggatcc

SEQ ID NO: 174 - DNA, 2047 bp, Artificial Sequence
  Description of Artificial Sequence: Synthetic polynucleotide
gtcgacaagcttcccgggccaccatgcccatgggctccctgcagcccctggccaccctgtacctgctgggcatgctggtggcctccgtgctggccgccgagaacctgtgggtgaccgtgtactacggcgtgcccgtgtggaaggaggccaagaccaccctgttctgcgcctccgacgccaaggcctacaagaaggaggtgcacaacgtgtgggccacccacgcctgcgtgcccaccgacccctccccccaggagctgttcctgaagaacgtgaccgagaacttcaacatgtggaagaacgacatggtggaccagatgcacgaggacatcatctccctgtgggaccagtccctgaagccctgcgtgaagctgacccccctgtgcgtgaccctgatctgctccaacgccatcgtgaagaactccaccaccgaggagatgtccaccgccctggtgaagaactccaccaccgaggccatgaagaactgctccttcaacaccaccaccgagatccgcgacaaggagaagaaggagtacgccctgttctaccgccccgacatcgtgcccctgaacaacgagaccggcaacatctccgagtaccgcctgatcaactgcaacacctccgcctgcacccaggcctgccccaaggtgaccttcgagcccatccccatccactactgcgcccccgccggctacgccatcctgaagtgcaacgacgagaccttcaacggcaccggcccctgctccaacgtgtccaccgtgcagtgcacccacggcatccgccccgtggtgtccacccagctgctgctgaacggctccctggccaaggaggagatcgtgatccgctccgagaacctgaccaacaacgccaagatcatcatcgtgcacctgcacacccccgtggagatcgtgtgcacccgccccaacaacaacacccgcaagtccgtgcgcatcggccccggccagaccttctacgccaccggcgacatcatcggcgacccccgcaaggcccactgcaacatctccgagaaggactggaacaagaccctgcaggaggtgggcaaggagctgcagaagcacttccccaacaagaccatccgctacaaccagtccgccggcggcgacatggagatcaccacccactccttcaactgcggcggcgagttcttctactgcaacacctccaagctgttcaactccacctacaacgacacctacatctccaccaactcctccgccaacaactcctccaccatcaccctgcagtgccgcatcaagcagatcatcaacatgtggcagggcgtgggccgctgcatgtacgccccccccatcgccggcaacatcacctgcaagtccaacatcaccggcctgctgctgacccgcgacggcggccccgactccaacgagaccgagaccttccgccccgccggcggcgacatgcgcgacaactggcgctccgagctgtacaagtacaaggtggtgaagatcgagcccctgggcgtggcccccacccgctgcaagcgccgcgtggtgggccgccgccgccgccgccgcgccgtgggcatcggcgccgtgttcctgggcttcctgggcgccgccggctccaccatgggcgccgcctccatgaccctgaccgtgcaggcccgcaacctgctgtccggcatcgtgcagcagcagtccaacctgctgcgcgcccccgaggcccagcagcacctgctgaagctgaccgtgtggggcatcaagcagctgcaggcccgcgtgctggccgtggagcgctacctgcgcgaccagcagctgctgggcatctggggctgctccggcaagctgatctgctgcaccaacgtgccctggaactcctcctggtccaaccgcaacctgtccgagatctgggacaacatgacctggctgcagtgggacaaggagatctccaactacacccagatcatctacggcctgctggaggagtcccagaaccagcaggagaagaacgagcaggacctgctggccctggacctgcctgagaccggaggatagtaagcggccgcggatcc

SEQ ID NO: 175 - DNA, 2533 bp, Artificial Sequence
  Description of Artificial Sequence: Synthetic polynucleotide
gtcgacaagcttcccgggccaccatgcccatgggctccctgcagcccctggccaccctgtacctgctgggcatgctggtggcctccgtgctggccgccgagaacctgtgggtgaccgtgtactacggcgtgcccgtgtggaaggaggccaagaccaccctgttctgcgcctccgacgccaaggcctacaagaaggaggtgcacaacgtgtgggccacccacgcctgcgtgcccaccgacccctccccccaggagctgttcctgaagaacgtgaccgagaacttcaacatgtggaagaacgacatggtggaccagatgcacgaggacatcatctccctgtgggaccagtccctgaagccctgcgtgaagctgacccccctgtgcgtgaccctgatctgctccaacgccatcgtgaagaactccaccaccgaggagatgtccaccgccctggtgaagaactccaccaccgaggccatgaagaactgctccttcaacaccaccaccgagatccgcgacaaggagaagaaggagtacgccctgttctaccgccccgacatcgtgcccctgaacaacgagaccggcaacatctccgagtaccgcctgatcaactgcaacacctccgcctgcacccaggcctgccccaaggtgaccttcgagcccatccccatccactactgcgcccccgccggctacgccatcctgaagtgcaacgacgagaccttcaacggcaccggcccctgctccaacgtgtccaccgtgcagtgcacccacggcatccgccccgtggtgtccacccagctgctgctgaacggctccctggccaaggaggagatcgtgatccgctccgagaacctgaccaacaacgccaagatcatcatcgtgcacctgcacacccccgtggagatcgtgtgcacccgccccaacaacaacacccgcaagtccgtgcgcatcggccccggccagaccttctacgccaccggcgacatcatcggcgacccccgcaaggcccactgcaacatctccgagaaggactggaacaagaccctgcaggaggtgggcaaggagctgcagaagcacttccccaacaagaccatccgctacaaccagtccgccggcggcgacatggagatcaccacccactccttcaactgcggcggcgagttcttctactgcaacacctccaagctgttcaactccacctacaacgacacctacatctccaccaactcctccgccaacaactcctccaccatcaccctgcagtgccgcatcaagcagatcatcaacatgtggcagggcgtgggccgctgcatgtacgccccccccatcgccggcaacatcacctgcaagtccaacatcaccggcctgctgctgacccgcgacggcggccccgactccaacgagaccgagaccttccgccccgccggcggcgacatgcgcgacaactggcgctccgagctgtacaagtacaaggtggtgaagatcgagcccctgggcgtggcccccacccgctgcaagcgccgcgtggtgggccgccgccgccgccgccgcgccgtgggcatcggcgccgtgttcctgggcttcctgggcgccgccggctccaccatgggcgccgcctccatgaccctgaccgtgcaggcccgcaacctgctgtccggcatcgtgcagcagcagtccaacctgctgcgcgcccccgaggcccagcagcacctgctgaagctgaccgtgtggggcatcaagcagctgcaggcccgcgtgctggccgtggagcgctacctgcgcgaccagcagctgctgggcatctggggctgctccggcaagctgatctgctgcaccaacgtgccctggaactcctcctggtccaaccgcaacctgtccgagatctgggacaacatgacctggctgcagtgggacaaggagatctccaactacacccagatcatctacggcctgctggaggagtcccagaaccagcaggagaagaacgagcaggacctgctggccctggacggtggtggaagcggagatatcatcaagctgctgaacgagcaagtgaacaaagagatgaacagctccaacctgtacatgagcatgtccagctggtgctacacccacagccttgatggcgccggactgttcctgtttgatcacgccgccgaggaatacgagcacgccaagaagctgatcattttcctgaacgagaacaacgtgccagtgcagctgaccagcattagcgccccagagcacaagttcgagggcctgacacagatctttcagaaggcctacgaacacgagcagcacatctccgagagcatcaacaacatcgtggaccacgccattaagagcaaggatcacgccaccttcaattttctgcagtggtacgtggccgaacagcacgaggaagaagtgctgttcaaggacatcctggacaagattgagctgatcggcaacgagaaccacggcctgtatctggccgaccagtacgtgaagggaatcgccaagagccggaagtcctagtaagcggccgcggatcc

SEQ ID NO: 176 - protein, 652 aa, Artificial Sequence
  Description of Artificial Sequence: Synthetic polypeptide
MPMGSLQPLATLYLLGMLVASVLAAENLWVTVYYGVPVWKEAKTTLFCASDAKAYEKEVHNVWATHACVPTDPSPQELVLKNVTENFNMWKNDMVDQMHEDIISLWDQSLKPCVKLTPLCVTLNCSNARSNVNVTSINNTIMGEMKNCSFNTTTEIRDKEKKEYALFYKPDVVPLNETSNTSEYRLINCNTSACTQACPKVTFEPIPIHYCAPAGYAILKCNNKTFNGTGPCSNVSTVQCTHGIRPVVSTQLLLNGSLAEKEIVIRSENLTNNAKIIIVHLNTSVEIVCTRPGNNTRKSVRIGPGQTFYATGDIIGDIRQAHCNISEGQWNKTLHEVSKELQKHFPNKTIKYERSAGGDMEIATHSFNCGGEFFYCNTSNLFNGTYNGTYINTSSTSYITLQCRIKQIINMWQGVGRCMYAPPIAGNITCKSNITGLLLTRDGGTKNNSNEETFRPAGGDMRDNWRSELYKYKVVKIEPLGVAPTRCKRRVVGRRRRRRAVGIGAVFLGFLGAAGSTMGAASMTLTVQARNLLSGIVQQQSNLLRAPEAQQHLLKLTVWGIKQLQARVLAVERYLRDQQLLGIWGCSGKLICCTNVPWNSSWSNRNLSEIWDNMTWLQWDKEISNYTQIIYGLLEESQNQQEKNEQDLLALD

SEQ ID NO: 177 - protein, 652 aa, Artificial Sequence
  Description of Artificial Sequence: Synthetic polypeptide
MPMGSLQPLATLYLLGMLVASVLAAENLWVTVYYGVPVWKEAKTTLFCASDAKAYEKKVHNVWATHACVPTDPSPQELVLKNVTENFNMWKNDMVDQMHEDIISLWDQSLKPCVKLTPLCVTLNCSNARSNVNVTSINNTIMGEMKNCSFNTTTEIRDKEKKEYALFYKPDVVPLNETSNTSEYRLINCNTSAVTQACPKVTFEPIPIHYCAPAGYAILKCNNKTFNGTGPCSNVSTVQCTHGIRPVVSTQLLLNGSLAEKEIVIRSENLTNNAKIIIVHLNTSVEIVCTRPGNNTRKSVRIGPGQWFYATGDIIGDIRQAHCNISEGQWNKTLHEVSKELQKHFPNKTIKYERSAGGDMEIATHSFNCGGEFFYCNTSNLFNGTYNGTYINTSSTSYITLQCRIKQIINMWQGVGRAMYAPPIAGNITCKSNITGLLLTRDGGTKNNSNEETFRPAGGDMRDNWRSELYKYKVVKIEPLGVAPTRCKRRVVGRRRRRRAVGIGAVFLGFLGAAGSTMGAASMTLTVQARNLLSGIVQQQSNLLRAPEAQQHLLKLTVWGIKQLQARVLAVERYLRDQQLLGIWGCSGKLICCTNVPWNSSWSNRNLSEIWDNMTWLQWDKEISNYTQIIYGLLEESQNQQEKNEQDLLALD

SEQ ID NO: 178 - protein, 652 aa, Artificial Sequence
  Description of Artificial Sequence: Synthetic polypeptide
MPMGSLQPLATLYLLGMLVASVLAAENLWVTVYYGVPVWKEAKTTLFCASDAKAYEKEVHNVWATHACVPTDPSPQELVLKNVTENFNMWKNDMVDQMHEDIISLWDQSLKPCVKLTPLCVTLNCSNARSNVNVTSINNTIMGEMKNCSFNTTTEIRDKEKKEYALFYKPDVVPLNETSNTSEYRLINCNTSACTQACPKVTFEPIPIHYCAPAGYAILKCNNKTFNGTGPCSNVSTVQCTHGIRPVVSTQLLLNGSLAEKEIVIRSENLTNNAKIIIVHLNTSVEIVCTRPGNNTRKSVRIGPGQTFYATGDIIGDIRQAHCNISEGQWNKTLHEVSKELQKHFPNKTIKYERSAGGRMEIATHSFNCGGEFFYCNTSNLFNGTYNGTYINTSSTSYITLQCRIKQIINMWQGVGRCMYAPPIAGNITCKSNITGLLLTRDGGTKNNSNEETFRPAGGDMRDNWRSELYKYKVVKIEPLGVAPTRCKRRVVGRRRRRRAVGIGAVFLGFLGAAGSTMGAASMTLTVQARNLLSGIVQQQSNLLRAPEAQQHLLKLTVWGIKQLQARVLAVERYLRDQQLLGIWGCSGKLICCTNVPWNSSWSNRNLSEIWDNMTWLQWDKEISNYTQIIYGLLEESQNQQEKNEQDLLALD

SEQ ID NO: 179 - protein, 658 aa, Artificial Sequence
  Description of Artificial Sequence: Synthetic polypeptide
MPMGSLQPLATLYLLGMLVASVLAAENLWVTVYYGVPVWKEAKTTLFCASDAKAYEKEVHNVWATHACVPTDPSPQELVLKNVTENFNMWKNDMVDQMHEDIISLWDQSLKPCVKLTPLCVTLNCSNARSNVNVTSINNTIMGEMKNCSFNTTTEIRDKEKKEYALFYKPDVVPLNETSNTSEYRLINCNTSACTQACPKVTFEPIPIHYCAPAGYAILKCNNKTFNGTGPCSNVSTVQCTHGIRPVVSTQLLLNGSLAEKEIVIRSENLTNNAKIIIVHLNTSVEIVCTRPGNNTRKSVRIGPGQTFYATGDIIGDIRQAHCNISEGQWNKTLHEVSKELQKHFPNKTIKYERSAGGDMEIATHSFNCGGEFFYCNTSNLFNGTYNGTYINTSSTSYITLQCRIKQIINMWQGVGRCMYAPPIAGNITCKSNITGLLLTRDGGTKNNSNEETFRPAGGDMRDNWRSELYKYKVVKIEPLGVAPTRCKRRVVGRRRRRRAVGIGAVFLGFLGAAGSTMGAASMTLTVQARNLLSGIVQQQSNLLRAPEAQQHLLKLTVWGIKQLQARVLAVERYLRDQQLLGIWGCSGKLICCTNVPWNSSWSNRNLSEIWDNMTWLQWDKEISNYTQIIYGLLEESQNQQEKNEQDLLALDLPETGG

SEQ ID NO: 180 - protein, 820 aa, Artificial Sequence
  Description of Artificial Sequence: Synthetic polypeptide
MPMGSLQPLATLYLLGMLVASVLAAENLWVTVYYGVPVWKEAKTTLFCASDAKAYEKEVHNVWATHACVPTDPSPQELVLKNVTENFNMWKNDMVDQMHEDIISLWDQSLKPCVKLTPLCVTLNCSNARSNVNVTSINNTIMGEMKNCSFNTTTEIRDKEKKEYALFYKPDVVPLNETSNTSEYRLINCNTSACTQACPKVTFEPIPIHYCAPAGYAILKCNNKTFNGTGPCSNVSTVQCTHGIRPVVSTQLLLNGSLAEKEIVIRSENLTNNAKIIIVHLNTSVEIVCTRPGNNTRKSVRIGPGQTFYATGDIIGDIRQAHCNISEGQWNKTLHEVSKELQKHFPNKTIKYERSAGGDMEIATHSFNCGGEFFYCNTSNLFNGTYNGTYINTSSTSYITLQCRIKQIINMWQGVGRCMYAPPIAGNITCKSNITGLLLTRDGGTKNNSNEETFRPAGGDMRDNWRSELYKYKVVKIEPLGVAPTRCKRRVVGRRRRRRAVGIGAVFLGFLGAAGSTMGAASMTLTVQARNLLSGIVQQQSNLLRAPEAQQHLLKLTVWGIKQLQARVLAVERYLRDQQLLGIWGCSGKLICCTNVPWNSSWSNRNLSEIWDNMTWLQWDKEISNYTQIIYGLLEESQNQQEKNEQDLLALDGGGSGDIIKLLNEQVNKEMNSSNLYMSMSSWCYTHSLDGAGLFLFDHAAEEYEHAKKLIIFLNENNVPVQLTSISAPEHKFEGLTQIFQKAYEHEQHISESINNIVDHAIKSKDHATFNFLQWYVAEQHEEEVLFKDILDKIELIGNENHGLYLADQYVKGIAKSRKS

SEQ ID NO: 181 - protein, 662 aa, Artificial Sequence
  Description of Artificial Sequence: Synthetic polypeptide
MPMGSLQPLATLYLLGMLVASVLAAENLWVTVYYGVPVWKEAKTTLFCASDAKAYKKEVHNVWATHACVPTDPSPQELFLKNVTENFNMWKNDMVDQMHEDIISLWDQSLKPCVKLTPLCVTLICSNAIVKNSTTEEMSTALVKNSTTEAMKNCSFNTTTEIRDKEKKEYALFYRPDIVPLNNETGNISEYRLINCNTSACTQACPKVTFEPIPIHYCAPAGYAILKCNDETFNGTGPCSNVSTVQCTHGIRPVVSTQLLLNGSLAKEEIVIRSENLTNNAKIIIVHLHTPVEIVCTRPNNNTRKSVRIGPGQTFYATGDIIGDPRKAHCNISEKDWNKTLQEVGKELQKHFPNKTIRYNQSAGGDMEITTHSFNCGGEFFYCNTSKLFNSTYNDTYISTNSSANNSSTITLQCRIKQIINMWQGVGRCMYAPPIAGNITCKSNITGLLLTRDGGPDSNETETFRPAGGDMRDNWRSELYKYKVVKIEPLGVAPTRCKRRVVGRRRRRRAVGIGAVFLGFLGAAGSTMGAASMTLTVQARNLLSGIVQQQSNLLRAPEAQQHLLKLTVWGIKQLQARVLAVERYLRDQQLLGIWGCSGKLICCTNVPWNSSWSNRNLSEIWDNMTWLQWDKEISNYTQIIYGLLEESQNQQEKNEQDLLALD

SEQ ID NO: 182 - protein, 662 aa, Artificial Sequence
  Description of Artificial Sequence: Synthetic polypeptide
MPMGSLQPLATLYLLGMLVASVLAAENLWVTVYYGVPVWKEAKTTLFCASDAKAYKKKVHNVWATHACVPTDPSPQELFLKNVTENFNMWKNDMVDQMHEDIISLWDQSLKPCVKLTPLCVTLICSNAIVKNSTTEEMSTALVKNSTTEAMKNCSFNTTTEIRDKEKKEYALFYRPDIVPLNNETGNISEYRLINCNTSAVTQACPKVTFEPIPIHYCAPAGYAILKCNDETFNGTGPCSNVSTVQCTHGIRPVVSTQLLLNGSLAKEEIVIRSENLTNNAKIIIVHLHTPVEIVCTRPNNNTRKSVRIGPGQWFYATGDIIGDPRKAHCNISEKDWNKTLQEVGKELQKHFPNKTIRYNQSAGGDMEITTHSFNCGGEFFYCNTSKLFNSTYNDTYISTNSSANNSSTITLQCRIKQIINMWQGVGRAMYAPPIAGNITCKSNITGLLLTRDGGPDSNETETFRPAGGDMRDNWRSELYKYKVVKIEPLGVAPTRCKRRVVGRRRRRRAVGIGAVFLGFLGAAGSTMGAASMTLTVQARNLLSGIVQQQSNLLRAPEAQQHLLKLTVWGIKQLQARVLAVERYLRDQQLLGIWGCSGKLICCTNVPWNSSWSNRNLSEIWDNMTWLQWDKEISNYTQIIYGLLEESQNQQEKNEQDLLALD

SEQ ID NO: 183 - protein, 662 aa, Artificial Sequence
  Description of Artificial Sequence: Synthetic polypeptide
MPMGSLQPLATLYLLGMLVASVLAAENLWVTVYYGVPVWKEAKTTLFCASDAKAYKKEVHNVWATHACVPTDPSPQELFLKNVTENFNMWKNDMVDQMHEDIISLWDQSLKPCVKLTPLCVTLICSNAIVKNSTTEEMSTALVKNSTTEAMKNCSFNTTTEIRDKEKKEYALFYRPDIVPLNNETGNISEYRLINCNTSACTQACPKVTFEPIPIHYCAPAGYAILKCNDETFNGTGPCSNVSTVQCTHGIRPVVSTQLLLNGSLAKEEIVIRSENLTNNAKIIIVHLHTPVEIVCTRPNNNTRKSVRIGPGQTFYATGDIIGDPRKAHCNISEKDWNKTLQEVGKELQKHFPNKTIRYNQSAGGRMEITTHSFNCGGEFFYCNTSKLFNSTYNDTYISTNSSANNSSTITLQCRIKQIINMWQGVGRCMYAPPIAGNITCKSNITGLLLTRDGGPDSNETETFRPAGGDMRDNWRSELYKYKVVKIEPLGVAPTRCKRRVVGRRRRRRAVGIGAVFLGFLGAAGSTMGAASMTLTVQARNLLSGIVQQQSNLLRAPEAQQHLLKLTVWGIKQLQARVLAVERYLRDQQLLGIWGCSGKLICCTNVPWNSSWSNRNLSEIWDNMTWLQWDKEISNYTQIIYGLLEESQNQQEKNEQDLLALD

SEQ ID NO: 184 - protein, 668 aa, Artificial Sequence
  Description of Artificial Sequence: Synthetic polypeptide
MPMGSLQPLATLYLLGMLVASVLAAENLWVTVYYGVPVWKEAKTTLFCASDAKAYKKEVHNVWATHACVPTDPSPQELFLKNVTENFNMWKNDMVDQMHEDIISLWDQSLKPCVKLTPLCVTLICSNAIVKNSTTEEMSTALVKNSTTEAMKNCSFNTTTEIRDKEKKEYALFYRPDIVPLNNETGNISEYRLINCNTSACTQACPKVTFEPIPIHYCAPAGYAILKCNDETFNGTGPCSNVSTVQCTHGIRPVVSTQLLLNGSLAKEEIVIRSENLTNNAKIIIVHLHTPVEIVCTRPNNNTRKSVRIGPGQTFYATGDIIGDPRKAHCNISEKDWNKTLQEVGKELQKHFPNKTIRYNQSAGGDMEITTHSFNCGGEFFYCNTSKLFNSTYNDTYISTNSSANNSSTITLQCRIKQIINMWQGVGRCMYAPPIAGNITCKSNITGLLLTRDGGPDSNETETFRPAGGDMRDNWRSELYKYKVVKIEPLGVAPTRCKRRVVGRRRRRRAVGIGAVFLGFLGAAGSTMGAASMTLTVQARNLLSGIVQQQSNLLRAPEAQQHLLKLTVWGIKQLQARVLAVERYLRDQQLLGIWGCSGKLICCTNVPWNSSWSNRNLSEIWDNMTWLQWDKEISNYTQIIYGLLEESQNQQEKNEQDLLALDLPETGG

SEQ ID NO: 185 - protein, 830 aa, Artificial Sequence
  Description of Artificial Sequence: Synthetic polypeptide
MPMGSLQPLATLYLLGMLVASVLAAENLWVTVYYGVPVWKEAKTTLFCASDAKAYKKEVHNVWATHACVPTDPSPQELFLKNVTENFNMWKNDMVDQMHEDIISLWDQSLKPCVKLTPLCVTLICSNAIVKNSTTEEMSTALVKNSTTEAMKNCSFNTTTEIRDKEKKEYALFYRPDIVPLNNETGNISEYRLINCNTSACTQACPKVTFEPIPIHYCAPAGYAILKCNDETFNGTGPCSNVSTVQCTHGIRPVVSTQLLLNGSLAKEEIVIRSENLTNNAKIIIVHLHTPVEIVCTRPNNNTRKSVRIGPGQTFYATGDIIGDPRKAHCNISEKDWNKTLQEVGKELQKHFPNKTIRYNQSAGGDMEITTHSFNCGGEFFYCNTSKLFNSTYNDTYISTNSSANNSSTITLQCRIKQIINMWQGVGRCMYAPPIAGNITCKSNITGLLLTRDGGPDSNETETFRPAGGDMRDNWRSELYKYKVVKIEPLGVAPTRCKRRVVGRRRRRRAVGIGAVFLGFLGAAGSTMGAASMTLTVQARNLLSGIVQQQSNLLRAPEAQQHLLKLTVWGIKQLQARVLAVERYLRDQQLLGIWGCSGKLICCTNVPWNSSWSNRNLSEIWDNMTWLQWDKEISNYTQIIYGLLEESQNQQEKNEQDLLALDGGGSGDIIKLLNEQVNKEMNSSNLYMSMSSWCYTHSLDGAGLFLFDHAAEEYEHAKKLIIFLNENNVPVQLTSISAPEHKFEGLTQIFQKAYEHEQHISESINNIVDHAIKSKDHATFNFLQWYVAEQHEEEVLFKDILDKIELIGNENHGLYLADQYVKGIAKSRKS

What is claimed is:

1. A recombinant HIV-1 envelope selected from the envelopes listed in Table 3, Table 4, FIGS. 1-3, or FIG. 20.

2. A composition comprising the envelope of claim 1 and a carrier, wherein the envelope is a protomer comprised in a trimer.

3. The composition of claim 2, wherein the envelope is comprised in a stable trimer.

4. A composition comprising a nanoparticle and a carrier, wherein the nanoparticle comprises any one of the envelopes of claim 1.

5. The composition of claim 4, wherein the nanoparticle is a ferritin self-assembling nanoparticle.

6. A composition comprising a nanoparticle and a carrier, wherein the nanoparticle comprises any one of the trimers of claim 2 or 3.

7. The composition of claim 6, wherein the nanoparticle is a ferritin self-assembling nanoparticle.

8. The composition of claim 7, wherein the nanoparticle comprises multimers of trimers.

9. The composition of claim 7, wherein the nanoparticle comprises one to eight trimers.

10. A method of inducing an immune response in a subject comprising administering an immunogenic composition comprising any one of the recombinant envelopes of the preceding claims or compositions of the preceding claims, in an amount sufficient to induce an immune response.

11. The method of claim 10, wherein the composition is administered as a prime.

12. The method of claim 10, wherein the composition is administered as a boost.

13. A nucleic acid encoding any of the recombinant envelopes of the preceding claims.

14. A composition comprising the nucleic acid of claim 13 and a carrier.

15. A method of inducing an immune response in a subject comprising administering an immunogenic composition comprising the nucleic acid of claim 13 or the composition of claim 14.

16. A method of inducing an immune response comprising administering an immunogenic composition comprising a prime immunogen from Table 4 followed by at least one boost immunogen from Table 4, wherein the boost immunogens are administered in the order appearing in Table 4, in an amount sufficient to induce an immune response.

17. The method of claim 16, further comprising administering a boost from Table 4, wherein the boost is CH848.0808.15.15 in any suitable form.

18. The method of claim 17, further comprising administering a boost from Table 4, wherein the boost is CH848.0358.80.06 in any suitable form.

19. The method of claim 17, further comprising administering a boost from Table 4, wherein the boost is CH848.1432.5.41 in any suitable form.

20. The method of claim 17, further comprising administering a boost from Table 4, wherein the boost is CH848.1621.4.44 in any suitable form.

21. The method of claim 17, further comprising administering a boost from Table 4, wherein the boost is CH848.1305.10.35 in any suitable form.

22. The method of claim 17, further comprising administering a boost from Table 4, wherein the boost is P0402.c2.11 (G) in any suitable form.

23. The method of claim 17, further comprising administering a boost from Table 4, wherein the boost is ZM246F (C) in any suitable form.

24. The method of claim 16-23, wherein the prime or boost immunogen are administered as a nanoparticle.

25. The method of claim 16-23, wherein the nanoparticle is a ferritin self-assembling nanoparticle.

26. The method of claim 16-23, wherein the prime or boost immunogen are administered as a mRNA-LNP formulation.
